United States Patent Application Publication US 2007/0054278 A1 - sequence listing, part 33

SEQ ID NO: 94186 - DNA, 14625 bp, Homo sapiens
gcatagtattcgatggtatatatgtgccacattttcttaatccagtctatcattgatgggcatttgggttggttccaagtctttgctattgtgaatagtgccgcaataaacatacgtgtgcatgtgtctttatagcagcatgatttataatccttgggtatatacccagtaatgggatggctgggtcaaatggtatttctagttctggatccttgagacattctgtaaattttaagtggagcatttcggccatttacattcaacattagtactgagatgtgaggtgctgttttactcatagtgctagttgttgactaaataccttgtttttttttttccattgtgttattggtttataggccctgtgagatttatgcttaaggagtttctattttggtatatttcaaggttttgtttcaagatttagaactccttttagcaattcttgtagtgctggcttggtagtggtgaattctcttggcatttttttttgtctaaaaaatactttatttttccttcatttatgaagctttgttttgctagatacaaaatgcttggctggcaattattttatctgaggaggctaaagataaacccagtcccttctggcttgtaaggtttctgctgaaaaatctgttgttaacctgataggttttcctttataggttacctgatgcttttgcctcacagttcttaagattctttcctttgtcttgactttagataacctgatgactatgtgcctgggtgatgatctttttctgatgaatttcccagatgttcttagagtttcttgtatttggatgtctagatctctagtgaggccagggaagttttccttgattattccctcaaacatgttttccaaactcttagatttctcttcttcctcaggaacaccaattattcttagatttggctgtttaacatagtcccaagtttcttggaggtcttgttcttttttttttttttttttcttgagatggagtctctctctcttgcccaggctggagtgcagtggcctgatctcggctcaccgcaacctccacctccctggttcaagcaattcccctgcctcaccttcctgagtagctgggattacaggcgcacaccaccacacccggctaatttttttgtgtttttcatagagacggggtttcaccatgttggccagactggcctcgaactcctgacctcaggcaatctgcctgcctcggcctcccaaagtgctgggtaatcccagccgtgcctggcctgtttatttttttaaaatattcttttttctttgtccttgtctgattgggttaatttaaaagagttgtctttgagctctgaagttcttcttctacttgtttgattctgttgttgaaacttttaagtgcattttgtgtttctctaaatgtgtctttcattttcagatgttgtgatagttttttctttatgatatctatttctctggagcgtttttcatccatactctgtattgttttttaaaatttctttctctggtatcttttcgagaagccgaataatcacccttctgaaattttaatctggcaattcagagatttcttcttggtttggatccattgctgggagctagtgtggtcttttgggggtgttatagaaacttgttttgtcataataccagaattacttttctgattcttgctcatttgggtagactatttcagtggaacaatctgaaactcaagggctgctgctcagattcttttgactcatggggtgatcccttgatgtggtacactcctcctttccctaaagatggggctctggcgagccagtctgcagactgattgttattgctcttctgggtctagccacccagtggtgctaccagactctaggctggtgctggagaatgtctgtgaagattcctgtgttgcaattcgtctttaggtctcccagttgtggataccagcacctgttctggtagagatggtaggggagtgacgtagactctgtgagagtccttggttgtagatatgtttagagtgcctgctttctcaaatgctggttatgccagcagtgaagctgtcacgtggacagattcagaaccactggttagccaggatgttgcaggcagtggaattagctgttattttctccttccttggaacagggttgttctgtcatgagttgctgtaatgtcctgagttggttggcctctagctgggaggtggtgtttttgagatagcaccagagtttttcacctgtcttgtggaatttgcaggggcctgccacttattttaaaggatctgtgatttgttatggttttcctgatatgctcctgcagtggttgctggagcaaaagttcatggtgtgaatctgcccacactgttctctccatccaagtgggagctgcacatcagccctgtctcctaaccaccatcttccctctctcacttttttcttttttattgctgagtaatagtccattgtatagatatatctcatttgtttatccattcatcagatgatggacatttgggctgtttccaccttttgtctattgtgaatactgctgttataaataaatattagtgagataatactttacatctatttgactgacaaaaattaagacagacaataccaaatactggagagatctattcaagggtatattgctgagtagagtgtaaatttgtttaaccattggaaaataacttggcattattttgaaaaatggaaaactcatactctctatgatccagcaatttcattcccatgtatatatccaagagaaacttcagcatataggcaccaggagacatatacgacagtgttaatagtagtattgtttctaagagtgaaaacttgaatcactgaagtgtgtatcaatggccatttctttaaggagttctgctctaaagggaaggaaagaaatggtgcagtaatggaggttgagaattttttttttaaatgggagaaaaaatagcacacttgtatgctgaggcagtacttcaatggaaaaggaaaaaaaaatagtaagaatttctggataacctggtttctcagacacttagcttccatttatctgccagttctggagggtgccgtatataccttccagttttaagttttacctatgttcacttgccattttaaaaaaaacttgtattaggttcagggtacatgtgcctgtttgttatataggtaaattgtgtgtcacggcagtttggtgtacagattatttctccacctaggtaaaaagcatagtacccgatagatggtttttcagtcctcactctcctcccttcctccaccctcaagtaggccccagagtctgctgtttccttttttgtgtccatatgtactcaatgttttgctcccacttgtgagaacatatgatagttggctttctgttcctatgttggttaacttaggataatggcatccagctccacccatgttgctgtaaagaacatgatcttgttcttttttatggttgcatagtattccatggtgtatatgtaccacattttctttattcagtctactgttgatgggcatttagggaagattccatgtgtttgctattgtgaacagtgctgcaataaacatgggagtgcgttttttttttacagtagaatgatttatattcctttggatatatactcaataatgagattgctaagtcaaatcataattatgctttgtgttctttgagaaatcaccaaactgctttctataatggctgaagtaatttacattcccaccagcagtgtatgtgttgcttttctctgcaaccttgccagcatctgttgttttttgactttttaataatattcattctgactggtgtgagatggtatctaaatgtggttttgatttgcatttctgtaatgacgagtgatgttaagcattttttatatgcttgttggccgcatgtctatcttcttttgagaagtgtctgtttatgtcctttgcctttttaatgaggttttttgcttattgatttttaaaattccttatagattctggatattagacctttcttggattcatagtttgaaaatattttctcccattctgtagattgtctgcttactctgttgatagtttattttgtggtgcggaaactctttaattaggtcccatttgtcaatttttgtttttgttgcaattgcttttggcatcctcatgatgaaatctttgtcaggtcctatgtccagaatggtatttcccaggttaccttctaaggtttttagttttaggttttacatttaagtctttaatccattttgagttgagttttgtatatggtataggaagggggtcctgtttcatctgtatatggctagctagttatccaagcaccatttattgaatagggagtcttttgcccattgcttgtttttatcaactttgttgaagaccagatggttgtaggtcattcttaaactgctggattaaataagagcacatcaactgagtatccaaagttattttttatatctcttatacagaattcgattggtccacctttcatcatatcactagagaaatcagatccaagttaccatatgtgttcagtcaaaggttattatacagcagtcaaaatgaatgaattacatgcaacatgtattaagaacatatgaatgcagttacatgcaacaacatggattaatatagcaacaaaatgttgaataaaaaggcaagttgaagactacatgtagtattatatcctttttagaatatttaaatgcaagcaaaattaaacaatgttacttagacatactttgtatgtgatcacacaaatgtgcaagaacaaaattcaggacaatgactacctcagggaggacagtacgagaagaaaaggagcacacagatctaaatcactggtaattttctagttcagtgtttctcaaactttaatgtgcatcagaatcaccttaaaatctaaattactgggccctaccctcagagttttctggttcagtaggtgggggatggggcctaagaatatacatatcgaacgaagttccaggtgctgccagttctgctgctctggggaccacactctgaaaccacttgtagttcttagattgggttgtaggttcatagctgctccattttattattaaatgtatatgctacttaaattaaattaaaaaaaaaagatcaaagatgagagtgtgttatgaactagggattaacattaattcaattctgggctcctgaggtttcctcccctaaaaaaaattctaaggttccattactaaaagcaaacttgagaaacactattttaaaagaacttcaagaccattaaaaaaattaactttttgagaaataaatttgaaaattattctttatatgcacagtgacagcatattgcactctactttcctggatctcaataaactttggcaagaacttggcagatcacaaatctacttttgttgattcaacaaaaactgtttaaagacttctcttccattctcagttcttatccttctctcaaaatgctgtaggtaatgatttttcatcttttttctctctccctcccttacagattgatttaggctctgagataaaatttaggtgacattttagatatcgacagggcatgtgcagagcaatactctgtcttgcagtatgccagccacggacggggtttagacaaacggctgaatataaaactcttgcctacaagcagctcagcctagagggggaaacagattcataaatataaaattacaatccaaagcaggaaacacagtatgttatacgaaggcaaagaggttcgtcttctttcatagcctctcctaaacccggcaactctgagctgtttttctggcaagccgccgtccattggcggcctctggcgccgcggctttcggcgtgcggacggcgcaggcgcgggcggggcggggccgggcggggagggcggtgagggccggcgctcggggccgcgtttcattggctttccggccggaagctgcggcgcgacccggctgcgcatgcgcctctcacacgtgctgtcagaacgccgcctcctccgcttgcggccggtctgcaccatgctgcgaacgtccgtcctccgcctgctaggacgcacgggggctagtaggctgtctctcctggaggacttcggcccacgctactacagttcgggctccctcagtgccggcgatgatgcttgtgatgtgcgcgcctacttcactacacccattttctacgtgaacgcggcgccgcacatcgggcacctgtactcggcactactggcggacgccctatgccgccaccgtcgcctccgaggtcccagcacggccgccacgcgattctccactggtaccgacgagcacgggctgaagattcagcaggcagcagctaccgcgggcctggccccgaccgagctgtgcgaccgagtctctgagcagttccagcagcttttccaggaggccggtatctcctgcacagatttcatccgcaccacggaggcccggcaccgggtggctgtgcagcacttctggggggtgcttaagtcccgyggtctgctctacaagggcgtctatgaaggttggtattgcgcttccgacgagtgcttcctgcctgaggccaaggtcacccagcagccgggcccatcgggggattcgtttcctgtatctctcgagagcgggcatccrgtctcctggaccaaggaagaaaactacattttcaggctttcccagttccggaagccactccagcggtggctgcggggcaaccctcaggcgatcacccccgaaccatttcatcacgtagttcttcagtggctggacgaggagytgcccgacctgtccgtgtctcgcagaagtagccacttgcactggggcattccggtgcccggggatgattcgcagaccatctatgtatggctggatgccctggtcaactacctcactgtaattggctacccaaatgctgagttcaaatcttggtggccggccacctctcatatcataggtaaggacattctcaaattccatgccatctattggcctgccttcctgttaggggccggcatgagcccgccacagcgcatctgtgtccattcccactggacagtctgtggccaaaagatgtccaagagcttgggcaacgtggtggatcctaggacttgccttaaccgctataccgtggatggcttccgctactttctccttcggcagggcgtccccaactgggactgtgactactatgatgaaaaggtggttaagttgctgaactccgagctggcagatgccttgggaggtctcttgaaccgatgcactgccaaaagaataaatccttctgagacctacccagccttctgcactacctgcttccctagtgagccagggttggtggggccgtcagttcgtgctcaggcagaggattatgctctggtgagcgcagtggccactttgccaaagcaggtagcagaccactatgataactttcggatatataaggctctggaggccgtgtccagctgtgtccggcaaactaatggttttgtccaaaggcatgcaccatggaagctgaactgggagagcccagtggatgctccctggctgggtactgtgcttcatgtggccttggaatgtttgcgagtctttgggactttgctgcagcctgtcaccccaagcctagctgacaagctgctgtctaggctgggggtctctgcctcagagaggagtcttggagagctctatttcttgcctcgattctatggacatccatgcccttttgaagggaggaggctgggacctgaaactgggcttttgtttccaagactagaccagtccaggacttggctggtgaaagcccaccggacctagaaactcagttcttaccggcttgtggtaaaaaagcaaatgtgttatctttttattttttattttcaggaaagttatactagtattttcttaagtgtggaatcaaatgagcacataagctgtgtccctgtgaaaagaggtttgtagcctttcaggtgcctgctcctattcttcatttctctgtgaccattgatcactgtcctttgtgcattgtgtgtctaagatgtcttcaggggaaagatgggtaagagacagtgttgctaatgctgttccttctttgtgcctccttccaaaccacagttatttgcccaaactacctctcgtggctggtttttcattggcctggcctctgcttctcaggctaattagtgactcctttctttgagggtcagggttggaggccccttactggtggttttacagggggatcctactttgttacacatgttgggtttcctgataaaaagagagtattttattaaacccttgaaccagtgtcctagaccagatgatttttgcccatgtgtatccccatttaaattcctacaactaagtctccctgctttgttaatagtccaacagttgggttgtgtaacatcacacttcaaccggtagatggctctaatctcacacatttacttactaaagattgaggattcggaatatttagaataaattagttttctgctttctaattttgcagatctttacatttttattgcttttcttaaaataagggatagctttgcaaccactattgttttaatggaaagcaaaaaacccccccaaacttatcagaatcctcgttctttttcagactactgaaaaatgacatttactctgttaaatgtttaataagtgaataagtaaatgtatcaagttgtttatataataaattataaaactcttgaggcacttggtatgttaaaaattttaaactttagtaacattaggttacaggtatgatttaaaaatttgtaaatagttcaaaagggcaatgttttctttatatttcttatagtcttaattttgttatccatgtgcataatttacctcatgatttcttttggtcaatcaggatctttaatacaatatagaaattgtgtaatagttattataaatgttaatacacaactttcaggtaattttaactgattatttcttttgctcttttaacttaagttattaaagtttaaaagttcgtaagtaccttattcagatctgttctgttgcattcgttgaaggtgatggtgaaaggaggaactgaccaatgcttcaggaatctcagactggatttaggaatctctctaaggctccataagagaacatcacagagaagatgttagcaatttatacagtgattacaacatagtaagccagttatgtctcataggtgattagacagctgggccaaagttcaaaatgagaacttgccttggaatatacattctaagtatggtagcaagtagagagggcccacaatgaattaaactattgtactggtagttcccctggatttattctaggtgccaccattcagttccagtttctgtttattaatcagcgaaatgaggaatttttggttgctggaatattgcttagaagagaatgcttgaaggtattctaaaggtggaaggactgttgccacaaatgtcccttcagacccttcttattcataagtctgggctttccacatgacatgttcacgttaactgctggggttattagcacagactactggggcataggatgtaggagtgtaatatctcctacaggtggatagagcagagagtggaaaaagataatatgtatttacgtggatgaaggaaaacatatttgaaaaccagtgagatgataacctctgcctctgaagtgctcttatagcagtgttacagttcctaccatggatggagacagtgtcttctacttgaatgatctttcctatagccttgtgctggtcaatacaatcgacctttgcttgctggagggtgtcaatggagttcttttagtgcagtctgtcatttgtgcaggcacttagctggctacctggatatttgtgatactggaggacacaagaacataggggaaccagataggacagggcgtaattattagaaagacaggatattttattttgtttatttatttatttatttatttatttatttatttatttatttttgtgtgagcaataaagctttttaatcacctgggtgcaggcgggctgagtcggaaaagagagtcagcgaagggagatggggtggggccgttttataggatttgggtaggtaaaggaaaattacagtcaaagggggttctctggcgggcaggggtgggggtcacaaggtgctcagtgggggagcttttgaaccaggatgagccaggaaaaggaatttcacaaggtaatatcatcagttaaggcaggaacagcccattttcacttcttttgtggtggaatgtcatcagttaaggcaggaaccgaccatctggatgtgtacgtgcaggtcacaggggatatgatggcttagctttggtgcagaggcctgactttccaaagacagggtattttaaatggaggaatgtgtggtaagttggatctgacttctgcggtgatcctgaagatgaaccagttggattctctataggaggcacaatagatacagcaaatattctttgaataattagtgatgtgtttgagttggtccagaagtttaagaatagcaaatggagaatacgtgaaaactgaaggggatgtacttccaagagggggcatcctaaccacttctggtagaaaatgatacacttgtagaattccctactctagcactgttaatacttttatctggcattttctggattccttcgccagaaagtaactgtcttccaaatactatccttgaagtcctcaaatattcattttggtgtgttcctggaagcagcgttgcaggaggtgaaagaccactgcctagatcaggtattcatggatgtcacattaggagagtaataaaaagacgtcaactcactcagcagactataatcctctctgtgaagtcatgtgagaagtgggcaatgcacattttaagttgccccattatatactggagggctgtttcacaagtgaactcatagattagacagaagacctatggctataagaaggagcataagaaatagatataatctctgattttattgaaacctcagtttattctgcatgtagacctcattatttctcttaagaatctgtggactttgtagggtctatgaagagcccaataaattgaatatgaagttgatgtcagagtacttaagaagggcctaggctggaacatgggccctgggacactggtcttcccccttccccccaccccccaaggtggttgtacctgtgattgggacttaggttagctctttagctctgggaaatgtcaaaactgaagtgaaaccagtagttggtcaggttgtgagccctcaatgaggatgacatcatcatgaagtgagacctggagtgctggtgggtccttgccttgtcttttgtcagaaagtgaatatcaatggacctaaaagggtgtagacatattgacagattattgacagattattattattattatacatattattatatgtataataataatatgtattatatgatacatatataatataatatgtatatatataatacatataatataatatgtattatatgtataataatatgtgtaatattatacatattattgtcaatatgtagacatattgatagattctagaagaaagcccttgagtctcttggaaaactaagatagtataatatatgttatttcagcacaacaaaactcaccctgccccttcctcttgcaggaagtttggagaggattagttaactcttatcaagaggaacacaccaaatttggaggttaacaacagttaacaaccaagttaattaaggttaatgggaattttaaccttttaggaagagtatcttattctttctggagacaggacaggagaagccctggttaaacttccttcctatgtcaccaataactactttgagcagaggagaagggactaaccaatttagaggtgaaattagctgcttctctttagtaggtagtcttgggttacccagaatagatcctctgaattaaaggaactacctagcaggaaacagttggccatatttaaatagtttgtttaggattgtatcacattagtttccacttttcacgatgagggaagggaactagaaggaactacacaccaacaggatcttcctatggccccgacaactagaaataatatatcctctaccatgcctcttctgatgagtaccacttgggaggttcagccatacttggatgttcaccaaggtaagcaaggcatagtacatatgtttcatccttggccttgagctgaattgtacccccttagctaatggcacagtttactcaccatggattttaaagtccactgctcctcacttaagaacaggatggtgtgagatgtcaagatgtttcaggaaaccaagtgtgccatctgcaagaagaaaattatagctccaaggagggatgagccctgcccttgagtcacttctggatgaaacatctgcagagggcctgactcactgggtaagctgaagggacagacccaggaataactatggaaatggaggatgcctttcttagattatgatgtgggagaaatggtactaacacctctgtgctactgctattaaggccatgccttgtacatgtaccctcattagttgagaatcaattgtttatgggatttaacatgatgatgaagcttcaaaaactagataatgattgttataggttggtatcatcatattattcttttaatacattccataaaaatatgaccaattacacattttttcctgattgtatatttttggaacacattaaataaaatagcttcagtagtttggcttcctttgaaaccagtctagaagcttctattggttaaaaagctatagatattaaaaatataaagttaataaacatggtatacatcttagattaatcacaaaataatacaaatggaatgtatttctttcaagccagatgaaaagagaagtgaaagaaaacaatccaacagaagccaggaaggaacaatgcaatagaagacaggtaggagaaaaaagaggcaaagaaaaaggaaaaatattgtaaatagaaagcccaaaataaaatggcagaaataaatacaaatatgtcagtaattgtaataaaataaaacttcatgagtcttctgtcaaaagacaaaactattcaaaattaaatttaaaaagcaatatatgtagttaaaagggatatacttaaacatagaagaaactaagacatacgaagaaacactaggcatatattaaccaaaagaaagctggtgtagcaatattaatattacataatctatactagggggaaaccattactaaaaaggtggaatttaatataaaaggagtaatgcaccaagttacaattataaacttgtatgacctaaccacatagcctcaaaatgtaaaaagctaagattgaaaattacaagaaatgttcaagtctataaaaaaaaaaaaaggcccacagggtaaaagtataacaactcatactagacattagcatttcagtctttaatgcttactactaagtatatcatcactgctaaatgtagggaaaaaaaattatggcagtcaaggtttcgtgactctaaaactttgtctttttccatctatacctctgtgaaaataacagcttgctttttgaatataactgtcagccaaatatatctattcagtaagtcctctctgggttactaaaagcggggaatcacatggccataattttgccaaattttctgttagttcagtaataagttgaggggagagaaccaacagttctgttttccttatttgtgttctctcatttatttttcccttgaggtattcagcaccttaaggtactcttcttgtgtttaacccatttatgcctgaggttgcaattttttgaatttttgcaatcagaccttggcgaagaccttgagcaggatataaaataacccccacatgcttggcgttccaataatggaactctaggtataaatgggctaatgagaaacggaggtacagagattaagcaacttggctagcgttatacagcttgtaaaacaggagagcctgggactcaatcctgtgttaatgccaaagccttagcaccacctttagtaccaacaccacaatcagtcaatatgtatatactgagggcattgttttaagtattgtggggaagaggaagtagtataatgagatttaaagatctgaagatgaaaagtccaaataagaaccttgaactgaaatagatcagttagtgtttcaagatgaggaatctgtttgttgatagccagattatgaaactgatgagtgccaaaatagaaattcagaaaaatatacttacctttatcatgaaatatggtatatttcacttttgcttttagtattttcttttatatcctaaatctgcttatgtgtgctgtgcaaattgttaaaattttaaataactgtatagtccctatttttgtttgtccttgttttcttattttgtttcttaattttagaatgatgttccaatttctagaatctagcagttctctaagtgaaagtatatagtcaaattcatgaatctaagtattttttaatgatattttactaattatttaaatatacatttatctctgaacatgaaaacatcaacattcaaaagttttatttgaatty

SEQ ID NO: 94187 - DNA, 41067 bp, Homo sapiens
gtgtttattcataccaggagacctatagtcatcattaggtacaactcaccacctgtctctgtggatacccgctcagtaaaggcaaaatgaagatgtgtcaggtctcctctatcattttgcatgatgggctggatttattgtgtttcatagacaataaatattgagacaagaagacagtctcttggcccctttagatgcttttcccagctcctgcattcactctgccaggaatgggttttgaggacatgctagaaaagagagaaaatgcaattaaccagatggtgctaggaggagggactggggctgaaagccaacgcaggctgcagaaggaagagtggccacaaactaaaacaggatgacctgtcagtttcaatcacactggtgaaaactttaggaaacacatggctgaacacatttcacattggtcctgaaaagggaacaggttcttagtgaactgaacacacttcacattggtcctgaaaagggaacaggttcttagtgaaattcaaaaagtagagatgaaagaaatctctgggctgggcaccatggctcatgccagggtgagcaaaactctgtctcaaaaaaataaaaataaaaaaaccaggcacagtggctcatgcctgtaatcccagcactttgggaagccaaggcaggcagatcacctgaggttaggagtttgagaccagcctggccagcaaggtgaaaccccgtcgctactaaaaatacaaaaattagggaggcgtggtggcaggcaactgcagtcccagctacgcaggaggctgcagcaggagaatcgcttgaacctgggaggcagatattaggccgggcacagtggcttacgccagtaatcccagtaatcccagcactttgggaggctgaggcgggcggatcacaaggtcaggagatcgagaccagcctggctaacacggtgaaaccccacctctactaagaatacaaaaaattagccaggcatggtggtgggtgcctgtagtcccagctactggggaggctgaggtaggagaatggcgtgaacccgagaggcggagcttgcagtgagcacagatcatgccactgcactccagcctgggcgacacagcgagactccgtctcaaaaaaagaaaaaaaaaatctccaacagtcatctcattttgcagatgggtaatttgaagcccagagagaaaaaggactttcccagggtcacacagcaattgtatggctgatctgagacaggaattctcactattcaaagttcagtgattttctggcataacagaccaaagagtagtctcatctttgaacaaacagcaaatagatggttaactctagtaatatcacaggtgtatagcctaacttttaagctaagtcatccatgtgtacactcatctctatggccacagaaactagcaagagcctgtgcccaaaacttacccaaatttctgtggcttctaatttctagctcttcttcctttcagaccatggccagactatcacaagacatacgtatcaattcccctttgacttccaagctgatactgtcaaagagaaccagaaacaaccaaaagatatatgttgtcagagaacttggtgtgcccataagatttataaaagcagcaggtaaatcatattagatagtgagtattctttgaagccatgtcagatcagaaatcacgactctcatccaataaaactgtggaaaacaggaccattctagaatatctaaggttctgtgtgggatagagtaataacaggaaataaaagaggaagtgcaggttaagtctaccattcaggattctaacttgccaagtcatattcctggtagctcagaaagatgtttctataaaaaacaaaacaaaacaaaacaaataaaggccaggcaaggtggctcatgcctgtaaccccaacactttgggaggtgaaggtgggaggatggcttgaagccaagagtttgagaccagcctgggcaacaaagtgagaacccatctctacaaaaaattaaaaaataaaaaaattagccgggtgttttggtccatgcctatggtcccagctactcgggaggctgaggcaggaggatcccttgagcccaggagttggagactgcagtgagcaatgatcatgccactacacttcagtttgggtgacagagtgagatctcgccactacacttcagctcaggtgacagagtgagacctcgtccctaaaaaaaaattttctaaacaacaaacataaaatctggaatcaaaatagtaaatcaaacataaaatctagaatcaaaatctggtctgattggtgccatgtggttccttatcttttacctaattagacctatggtctgatcccaaataatgaccttaggcaaaatgtctaaatacaaaagctttcttcctttactttacaataagaataacaatccaaggccacggcaggtggatcacttgaggtcaggagttcgagaccagcctggtcaacatggcaaaaccccatctctgctaaaaatacaaaaattagccaggcgtggtggcacacgctggtaatcccagctacttgggaggctgaggcaggagaatcacttgaacccaggaggcagaggttgcagtgagccaggatcacaccactgtactccagcctggggtacagagtgagactccatctcaaaaaaaaaaaaaaagaataacaatccaaataataaacataatcattacttactgatcactacatatatgccagataatatgttacatacatcatagtccatgttctgttgctttttttttttttttttttgagatagagtcttgctctattgcccaggctggagtgcagtggtgcgatctcagctcactgcaagctccgcctcccaggttcacgccattctcctgcctcagcctcctgagtagctgaggctacaggtgcccgccaccatgcccggctaattttttttgtatttttagtagagacgaggtttcaccatgttagttaggatggtctcgatctcctgacctcgtgatccccccatcgcggcctcccaaagtgctgggattacaggcatgcgccactacacccagccttttctgctgcttttaacagaacacttgaaactgggtatgctatgttgctggggctggtctgaaacttctgggttcccaaagtgatgggattacaggcatgagccatcatgcctggtctcaccatgttgcccaggctggtctcaaactcctgggctcaagcaatccacctgtctttgactcttatggtgctaggattacaggtatgagccactgcacctggcctccgcctcttttaataaaggtaaaagataaggaaccacatggcaccaatcagaccagattttgattctagattttacgtttgatttactattactcttttaataaagcctcttttaataaatccattaactccttaaaccatcaatccatgaatgaattaatacactcatgaggggagagtcctcacgatccattcacctcttaaaagccccacctctcaatactgaattcagaccatgttcgaatacaaacattcagaccgccatgttaccttattcgcatttttcacttaatccccatctcaaacccgtgaaatgtaggcattattatttccaacaagaatcagagagacggccaggtacagtggctcatgcctgtaatcccaaaactttgggaggctgaggcagaggattgcttgaagccagccagcaggtcaagaccaacctgggcagcaaagtgagaccccatctctacagaaaataaaaaacttagctggacatggtaacacatgcctacagtcccagctactcaggaggctgagactacagtgtagccaccgccccacccacagattgctctttgaggttacggtgagctttgctcatgccactgcactccaacctgggaaacacagtgggaccgcatcttaaaaaaaattttttttttaaagaattagagagatgaagtaatttgcccatgtttgttaacaagtgatagaaccaatatttgaatttgtgtgaattcttctttaacttttaacatttttattttattttggagatgggtctcactatgtcacctagcctggagtacagttgttaccagaaagggatcccgatccagatcccaagagaagggtcttggatctcttccaagaaagaatctggggagaatccagaatgtaaaatgaaagcaagtttattaagaaagtaaaggaataaaagaatggctactccataggcagagcagcagcatgggctgctcagctgcttatacttattattacttcttgatgatatgctaaacaaggggtggattattcacgagttttccaggaaaggggcggacaattcccagaactgagggttcctcccctttacagaccatataggataacttcctgatgttgccatggcttttgtaaactgtcatggcactggtgggagtgtcttttagcatgctaatgcattataatcagcatataatgagcagtgaagacgaccagaggttcctttcattgctatcttgattttggtgggatttggccagcttctttactgcatgctgttttatcagcaaggtctttgtgacctgtatcttgtgccaacctcctatctcaccctgcaactaagaatgccttaaactcctgggaatgcagcccagtagatctccgccttatttcatccaatccctattcaagatggagtcgctctggtaaatgcctctgacacagttgctattcacaaactctatcacatacagcctcaaattcctgggcctcccaccttagtctcccaaatagccgggactgcagacacacaccactgcgcccagcaagtttttttagtttttaatcattgtatttcaaaaagtagttgggaggattaaatttaaattttaaaagtaaggcactttgcaaagtgtcagcccttggtatgtactcaataaatggtagcttgtgtcctctcctgtccttcttcacatcccttggcttatcatctgcaagaaggggcagtaaggctctttggtaagcgggtttctttgactggaatgcccaatcctctactgccaaccctctatccatctattgtaaaaactacagaattcctggccatctaactgggcaacaaaagtgaaggccaagagaagatacccaatgccatcttctcccattccagctggaggactaagactctaggaggcaaggggaaagggtgtcctggctttactgtgagaactggagcaactaaattttcttctctgggagtcagttttccctttagaaggagagagctgggctggagggccccaggggaatatggatcggtggcaaaaagaatgctcagcaagcaatttaactcctcagaccgtgccccatcttcaaaatgagtgacaataaaatgaataattgcacgtggtccacaaggcccctgaatttaagtaaatcacacaaagtgcttagcagagtcccatgaacataacgcgttccatagatgttacctctattcctgctattgtcatcattccgaccctaacattcaaggtgtctctattaagcaaaaggattcctttgtgaataattttaatccgccaatgtactcaagggtctatcttaagcacagctctagagccctgattgtagcgctttccatggcctgacgaccagctttcctgtctcaaggggaaatctgagaatggccgaacagccatgacagtcctctcgaagagttcattcccccttctctccgcgacctgctgaggtctgagcccgacttccccagcacgcccatctcagtcaccattggtcgcctcctcgctggcgtgactaagacccagccctcttctcgctgggaccactctgaggcgatctgcggaagctgaggggcctcggaggaggggccgcgatgcatctcgggctttgtagtcyacctgcacaactacagccagagagcggggcctcacgamccggagaactacaatccccagcagccgggcggaagcggagcgagggggggctcgcgtcacgtgggcgttcggcctgggcgggctatttctcagtgcggcggcggcggcggtggcggcggctccggggaccggggccttttgtttggagcggctgcgggggggccccggagcggcgaggccggcggccttccccagcttgctcggtcccggccacccctcgcgggggtggggggccgccccctgggccgggcatctcctcaggcgccgccgccccgccctaggccggccccgcccggcctgaggggaggaaccggccgggcctcgccgcgcggcccagccacctccggagtcgccgcctctgctctcagtgccccggatcggaggccgtccatcgcccctcgggccgacgccatgaagatcaaagatgccaagaaaccctgtaagacgggggctggggcccgccaggttgggagggcacccttgggccccgtctgaaagccccttggctgggcggtcggcttccaagcccgtcgctcctcgccggcgcttcgtccggtatgggggcggagggaccatttgagccacgagttcgaggcttccgtcctccccatccccctattcatgcatggtgaatgcctgccgccccctagcctttcctcccactttctcttcgagatctgggaggtgccagagggaatttctgattctgatttttgtcaaaccagactagtctcctctcccagctccccctgaattcaggttgaaaagaggcggtcgcggctgtcaggttgcgctggcggcttttagcacctgtttttagggatttccgggcttcctgcttgtgtccttgaaatgccggtgggttcctgggagttgtcactgttgttacagttggagctttcaaacgtacgtgcatgcagtctgccmgtgtgtaattgctttggcttgtttttgtttagaatatcaactagttcatgtttgttttagaaaacgcagataaacaagaaagataaagtcacccgtattccccgcacccggagcgaaccgctattaatattatggtgaatacccgtagatayttttctatgcatgtacttaaattctgactatgcttttagaaaggtcgactttcatttgcttccttttatgtttagtcttttaaaaaccttttattccagtaattgacttatttaatcacccagccattgtgattgtcactctttttaagtatagcctcccagaaggactaggaacgtggggattcatgctcatcttagagtcgtattgatacttttgctgtttttacagtgtttcatgtgatctctttaactgttaagaaatccacaactataaaacagggcgctgacaccttccctgcccgcctatyggggttcctgtaaaactcacctgagaggcaacaagccaaaaccctgtgaaaactacaaattcctatataactgtaaggtaatttggtcttaacttcacaggtgaggaaattgaacttagccccagagtaacttttccaagcatgtaccaaccatgtgctatgtggttcataactctaaggggactgactcataatacagtgttctttctcttgcacccatagagcattgtctaagtactttatctggtagtttcatctgttaattaaaatttttaaaaaattatttataactgaatagatcctgtcatagttgttcaagaaatctataaaatagtgatgtgaaggcttaaatgaaaagtaatatagagagactttaaattttcatttgctgaattaaactaatgcatcttgaacaggtgcagtaattagaacacttggacattttccctcacgcatacgttttctctgcttctcttagaatttccatttggtgaacagtgtatgaccaactcaaattctgactcttgtggtggtgattattttcttttgtcatgatagtgatttgattacttagatttgaacaaactaataatcaggtatgagtactacctccttcaaaggtgttttaggagagattataaagattattatgagaagtttataaaatagggctaggcacggtgggtcacacctgaaatcccagcactttgagaggccgaggcgggagaatcgctggaggccaggagttcgagaccaacctgggcaccatagtgagacctcatctctacaaataaataaataaaaagattagccgggcatggtggcacacgcctgtagtcccagccaaagacttaaaaatacacattaggttgagaaattagagaataccccctgtttttccccaaataagttgattattacaacattgtggtatgttgtgagaccattaatcttaaaattgaatcatgctgaaaatctggtcagttactatggtgtagaagcctaacatttttatatgtaaaaggtaactttactgtctgttgtttgtagtaaaagtaaggaacatgacgttttgtgtgtgggaaagaaggtatttcaaccatgaactgtcccagataataaaaaataaggctggacacggtggtttacacctgtaatcccagcactttgggaggctgagtggggcrgatcacgaggtcaggagttcgagaccagcctgaccaacatggtgaaaccccatctctactaaaaataggaaaattagccgagcatggtggcacgcgcctgtagtccaagctgttcgggaggcttgaggcaggagaattgctggaacccaggaggcggaggttacagkgagccgagatcacgccactgcactccagcctgggcaacagagcaacactccgtctcaaataataataataataataatattaatattattttaactttaaatcactcaggttaacaaaagatatatttgttttgtttttgaatacctgtatggggttttttttggcataattaaaacatttattgatcacatagtgtgtgtatggcattttctttatgtgcattgcatcatttaactgcatactagaagaagctgtatattatattggctaaacaagtgaccttggcttcacattatttacctaagtgttagaaaatatttcttctaaatacattaccaatatcttaacaggttataaacccgaatgcatatattaaccagaagatttaaaaaggaattagtttcatcctctaaattgtgtaactggaagattagcatttgaaattatgtgttaattcaacgccaggggaaggaaggagaaagtcaatcctgtgttactctcttccctgcctgccatgatttcttagggtacagatttttaagattgtgtttgggttacctgtatagcatgtaactggattaacaaggtgatagtaaaaggtgatacatgtatttaagtgtggtgtgatgtaggttttgagtttgtgctttattaacccaagtagtaaggtacttgaaatttttgttaagaccagagaaaatggtatagcatatatttgtagtttgtgtctgtgtaatttgattggcctgttgtaaactcagttgtaatatgagtcatcactcccagtagatagttggggtagtagtttctaatatagctccccttagaaataactaatttactaaagaaaaaaccacttacctgaagctgtcctaaggaatcagtactgagggtctgaagatgattattttcttaagtctatttcagaacaaaacccatttttgtttggaatgattattgagaatagtgaaatgtcttatccaggaagttgaagcgttatctagaatataccagcatacatgctaactttataattttgttcttttaaaataccctatgtttcgagcgtttttcatgttggtttccctttatgcctaaagaacaattaagtactgatttagtttagtatctcccccctcccctatttctttttattttttttcttttgagacgcgatctcacactgtcacccaggctggagtgcagtggcacgatctcagctcactgcaaccttggcatgccaggctcaagcaatcctcccccctcagcctccccagtagctagaactacaggtgcttgccactatgcccagctaatttttttgtttttggcagagatggggttttgccatgttgcccttgccaggctggtcttgaactccttagcttaagtgaccctcccrctgggattacaggcatgagccaygttcctggccaggatccctttagtctgaaatctgcatggtaccagtagcaattaaatagttatgttagkgttctctgcttccttagcaaacacttagtaggatactgagtttatcacaccttgttagaaattaacagtctgctcttgtggctagatagcttctgctgtttagtatcttaaaaggtgattggacaagaagatttctccttttgcatatataatgcgtctggtaagacatagcacttcatccttgtagtagtttgagatatttttgctacatatggggaactaatgtcaactctcataagaccacttgagacatagaataagagctattattttgttaaaggcataatgaacaggtcatgagagattctaataattctcacagtctgggactgtatattgaccatcatcaaagtgcttatatttgtgtaatgtgtgttttgttttgctttttaaatgtgtattttggttcttttttttcaccttagcaaggaatgttttattctgaaaaaaaaaatgttaaggttatatgccgtaagtaggctgcttgtgcactgatgacctacttttcaagggtctcttggctagaagcaacaaagctataaatatgtagatacttgcttgatttcctaggaaactggtatttttctctttttttttgagatggagtctcgcttttgtcgcccaggctggagtgcagtggtatgatgtcagctcactgcaacctctgcctcctgggttcaagcaattctcctgccttagcctcccaagtagctggrattacaggcacacgccaccaagcctggctaatttttgtatttctggtagagacgaggtttcaccatgttgcccaggcttgtccgaactcccgacctcaggtgatccacccacctcggcctcccatagtgctaggattacagatgtgagctaccgcaccaggccaggaaacgggtgtttttcttacctcatggaactattaggtggacctgtggttgtacttaatgtctgtatatttactcatattttcactgcaaataagtaaagtttgagcttcatgccctccccttattttggtgacatatatcaatcataagtattttgtagataatactggaaaatatatgttggtaattagaccacttactaaaaaaacaaacaaccccatcaaaaagtgggcgaaggacatgaacagacacttctcaaaagaagacatttatgcagccaaaaaacacatgaaaaaatgctcaccatcactggccatcagagaaatgcaaatcaaaaccacaatgagataccatctcacaccagttagaatggcaatcattaaaaagtcaggaaacaacaggtgctggagaggatgtggagaaataggaacacttttacactgttggtgggactgtaaactagttcaaccattgtggaagtcagtgtggcgattcctcagggatctagaactagaaataccatttgacccagccatcccattactgggtgtatacccaaaggactataaatcatgctgctataaagacacatgcacacgtatgtttattgcagcattattcacagtagcaaagacttggaaccaacccaagtgtccaacaatgatagactggattaagaaaatgtagcacatacacaccatggaatactatgcagccataaaaaaggatgagttcatgtcctttgtaggggcatggatgaaattggaaatcatcattctcagtaaactatcgcaagaacaaaaaaccaaacaccgcatattctcactcataggtgggaattgaacaatgagaacacatggacacaggaaggggaacatcacactctggggactgttgtggggtggggggaggggggagggatagcattgggagatatacctaatgctagatgacgagttggtgcagcgtaccaggatggcacatgtatacatatgtaactaacctgcacattgtgcacatgtaccctaaaacttaaagtataataataatttttaaaaaaagatttaaacaaaggagtgtatcataattgagaatttatgtctcttctgtttgtgctgccttctttgkgcctttttttttttttttttttttttttttttttttttttgccttgctgaggttctgcatctcgtgctttttaatagtgattatttttctggcataaagaaattaatttctgaagtctattgaattgaaaggatttcagtgtaaaaggtggccattaccagccaccaacttttcttttttcttaattgaagttatagcagggctgagttctctttcagtccctgctttgttgattttaaggagaaaattgttataactgatatatgctagaaataatagaaggagcctgcaattttctggtttgcatattatggttcctatgaagtcatcatctgcaggatagctctctagtttacctttctttaaaaacagcactcaaggaacgaacacatttctagtaggctagatttggaccttgtgccttctgtttagtttctcaattcatccaaaaccgtatccaggccatcaccaatcattctatacaacaaatgctccttctaacaaccccacaatatcaccccttaccacaaaatctttcttcagttgaatctctcccacactaggttcccacgccacccctaatcccrctcgaagcagccctgagaaacaccgcccattatctctccataccacccccaaagttttttgctgctccaacacttcaccactattttgttttgagtttcttattaatataagaagacaggaacatcaggcctctgagcccaagctaagccatcatatcccctgtgacttgcacatatacatccagatggcctgaagcaactgaagatcctcaaaagaagtgaaaatagccttaactgatgacataccaccattgtgatttgtttctcccccaccctaactgatcaatgtactttgtaatctcccccacccttaagaaggttctttgtaattctcaccacccttgagaatgtactttgtgagatccaccccctgccctcaaaacattgctcctaactccactgcctatcccaaaacctataagaactaatgataatcccaccaccctttgctgactctcttttcggacttagcccgcctgcacccaggtgaaataaacagccttgttgcacacacacacacacaaggttaggagatcaaaaccatcctagtcaacatggtgaaaccccttctttactaaaaataaaaaaattagttggtcgtggtagtgcacacctgtagtcccagctacttgggaggctgaggcaggagaattgcatgaacccaggaggtggaggctacagttagcagagatcatgccactgcactccagtctgggccacagagcaagactccatctcaaaaaaaaaaaaaaaaaaaaaaggcctatgttgctaggcactcaacaaaactgagaaaatatagtcactttcttctgcttatgttgcttagttatttatacctgtttatagttgacgtgatgaagtattgtgtttgagctcaaagctgcccctggcttcccaaattatggtctaatgtcattttacttttttaaaaaactttttttcctacactggaagtacctttccagaatacagaatactgtttcttaagattatctgtaatgtagctccagatctctaatttgagtttcaaatataaagacgaacgagctatttctccaaaagaagataatgaggattactccttcctcgtattaaaaattatatactaattttagtaaatgtgtaaattataaaatggagaaatgtatagacttctttctcattgaattatatgttcctggttttgtaatgcacacacatatcaaataaaatgagaaagtagaattttagaaataatttttattggcaacttttacataaaaactgttaaatatattttgttgccagacattttaatccatgtatcttgagtattaaactctttttgagtctctgtcataatagttaagatcctagagaatagaaatatatatttttaggatggaatcttggcactgtcacttaacagtttgacctcaggcaagtttgtaattgctttgcctccttgtctaagtggtacacttaatagagcaatcttatagtgggggtactgaggattaaatgagcctgtgtctgacaggtagtgagcactcagtaaatgttagctgtaattctatgaagaactgaatcagttgtgctttaaactaattctaaaaatttgaattttgtaattcataatattataatactgacttccttgggaacaattggaaaatactcctttgtgtcagtataaggattgtggccaataaatataaggaaatcacgttgtaaaactgaatttcataacctgaaggaatcaggtgaccaaagccagtcattttcaaatgccatttagatctgactatagtataatcttccgaatatatacagtatataatttttaatagcatcccgtatctcactcttaaagattattgtccagtgcctctgaggtaagacgtcaggaatctgtttttaaatgataagggttttgtaaatggtctataccatttttttcaagagggtgttacttaagatggcctctatcgctggccttactttactggcacatcttaagcagctcatttatattatcctgtacactgccaaagtagaaagtttgtttgctttctaatttgaaggtagactgtgccactctcttacttagaacgtcagtagtgttcccgttgtctaaaaagttcaagtctaagctctttagctaagtgtgcaaggtccttcatctatttccttagacttccccctttttctagttccttaaccgtactgacgtatgcctcttcacctttggatggggttttttgttgttttagtattttctacggtcaaacacaggcatagggtttatcattccttctattaatctatacttatataaaattttattttgtgtatctcgttcttaatgtgttttatttatattcccctgctacattgagcgctccttcagggcaggtattttattcatatgcattcctgtttcctggtgtagaggagatgatgattttctttctttctttctttctttctttttttttttttttgagacggagtcttgctccgtcgcccaggctggagtgcaatggcgcgatctctgctcactgcaagctccacctcccgggttcacgccattctcctgcctcagcctccagagtagctgggactacaggcgcctgccaccacggccggctaatttttttgtatttttttagtagagacggggtttcgctgtgttagccaggaaggtctcgatctcctgacctcgtgatccacccgtctcggcctcccaaagtgctgggatcacaggcgtaagccaccgcgcccggcctggagataatgattatttactgaagggaattgctttttgggtttgttttttatgacaggatctcactctgttacctaatctgcagtgtagtggtgcaaacatggctcaccgcagccccagcctcctggactcaagtgatcctcctgcctcagcctcctgtaactgggactacaggtgcatgctgccacgcccagctaatttttaaattttttgcggagacaggatcttgttatattgcyaaggctggtttcaaactcctgttttcaagcratcccccctacctcagcctcccaaagtattgggatttcaggtgtgagcaccatacctggcaggaattgctttttaaggaggtgcttttctcctgggttacttgaagtgattataggccagttttattgtattaaaatgyttatagaaacaaagattttcatgcccttagtgttgacctatttattgaaaaaagaatgatctgaattttttctcatccctggagcacatggtatttagtaaatgaaaaggggttgcctaccaggccaggaattaaaagatcctgggtcaactctaagcaccctatacgtttttagaaaatatattaataaaactttgaagggccgagcgcggtggctcacgcctgcaatcccagcactttgggaggcagaggcaggcggatcacaaggtcaggagatcgagaccatcctggctaacacggtgaaaccccgtctctactaaaaatacaaaaaaaaaaaaaattaggcaggcgtggtggtgggcacctgtagtcccagctactcgggaggctgaggcaggagaatggcgtgaacccgggaggcggagtttgcagtgagccaagatcgcgccactgcactccagcctgggcaacagagcgagactccatctcaaaaaaaaaaaaaaaaaaaaaactttgaagggaaaaaggtaagttccacatggaacatgtgtcttacccaatacatattattgcctgaatgcatgattcagagtaaatgaagtttgtggctaactggtttttaatttgtgtttctaaaatggatatatatatatatatatatttttttttttttttttttttttcctcccatagctttcccrtggtttggcatggacattgggggaactctagtaaagctctcgtactttgaacctattgatatcacagcagaggaagagcaagaagaagttgagagtttaaaaagtattcggaaatatttgacttctaacgtggcatatggatccaccggcattcgggatgtacaccttgaactgaaagatttaacactttttggccgaagagggaacttgcactttatcaggtttccaacccaggacctgcctacttttatccaaatgggaagagataaaaacttctcaacattgcagacggtgctatgtgctacaggaggtggtgcttacaagtttgaaaaagattttcgcacagtaggtatcttttactcaaaactgaaaattgatacctgtttttaaatatgagagtaggtttccatctagcatgttccttaattctccctgcacatgcagtgggaaatatgtatccatggttgcctttcacttggggcgttttaaacacgtttatgagatgagtaaaaattgcccggatttggtcatgttgttgcacataatatttggtaaaacttgtttagggctgtactacaaagctacaataaaaaggggatttggggactttaatgaatttggcagtgtacaaagccagatataaatgaagcttgaattattttcactattgtcctacatttacatggtttttggaatattacttattcaaataatattaatcttccagggccatctccttcccaaaccctaagtctggaaaccaatgtcttttggttagtataatggacacctgaatgaaaatctgttacccttttttttctgtttttatgctgttaatcctgccatgttcctgtgtcaaatggggtgatttgaatggatctggcaggagaactatgagtattggtttgagttatgtgctgttagcagtttgccatcttctagtcttttccattagaatgagagttcaaagagtggtttgccaagcttctagtcttttctattagaataaagaatggctctgtttaggaccactgaaatttgtttttcttgaaaatgtaaatgtgaataatttaatttctgaaaatcataagaaaatactgttaatggaatataaaggctgacgtgggaggatcacttgaggctaggagttggagaccagcctgggcaatatagtgggaccccgtctctacaaaaaataaaaaaattagctcagcatagtggcctgtgcttgtagtcccagccactcaagaggctgatgaagtgggaggattgcttgagctcttgagattgaggctgcagtgagctgtgattgagccattgcactccagcatgggtgacagtgagaccctgtctcagaaggaatataaataacttaaatggctcatagaagcgagacccatataatttgaggtaaagatctgtagtactgtatgaaaagaggtgccttgggaacacagaggagtaacaacagctagagagttgaagaggttcccagaggaagtgatatctaagctgcaatgttttataaacggtgtcttataatacgctttttactaacctgaaatgatgaatgtaatcatttcaaactagtactcaaactataatataaagacaggagattaaggtatcagttattaatcagaaattaatctatccgtgggtagattaacaaacagtatgatcattccagaggacatcatgaagtagttatatgcttgcacctatgcatagattgatcatgaataccaaagctacacatgccagattgatatggtatgttctgttggaaaataagataccataaatggcattgctgttggtgacatgaccctccaacatgctaaacaaacacttggtaaaattccaaacagtaagaagtacaattttcccttgctttatgtggtggttcaattcctagcaaatttagtatatatttaaaactacgtgggttgggcacagtggctcacgcctgtaattcyagcactttgggaagccaaggtgggcggatcacttgaggttaggagctggagaccagcctgaccaatgatggtgaaacctcatctctactaaaaatacaaaaattagccaggcgtggtggcgggcgcctgcaatcccagctacttgagaggctgaggcggagaatcgcttgaacccacgaggtggaggttgcagtgagccgagatcatgccactgtactccagcctgagtgacagagctagactctgtctcaaaaatgaatgaatgaatgaatgaatggagtgactgaatccataggacgaatacttttgtatttgtatacacagacagataggtaaaataactttgttattctctagcctcagataattataaataattttcctactgccactataaaaatgactggcagaacactcaaagataatgcatagatgggataattttttggtctgcagaaatgtcacacccattaaagatgtctggcatcacaagtccctgcccactaaatgtcagtttggtccttccttcctccccatcatttagaaaactagcagtgaggtgataccaccctcactgaggaccagtggactagatgaaatcccgaaagagattctgacatgaaacaaaatgaaaatgtgggggtcatagaccatttttaatttttgtaaagtaatacaggaaaatcatatagttgagtgtttttgaatgtcatccttttttgtttttgtttgtttgttttaacagattggaaacctccacctgcacaaactggatgaacttgactgccttgtaaagggcttgctgtatatagactctgtcagtttcaatggacaagccgagtgctattattttgctaatgcctcagaacctgagcgatgccaaaagatgccttttaacctggatgatccctatccactgcttgtagtgaacattggctcaggagtcagtrttttagcagtccattccaaagacaactataaacgagtgactgggacaaggtagtgacctttttggttgtattgctgcattcacattgttttatacacagaagttatgaaatcagtataataatgtcattytcaccagtaaaagagcatgtatttgcacaacagcaaaaaaaaaaatatatatatatatatatatwttttttttttaagtgaaagagggtgccatgttgcccaggctgctcttgaacttctgagctcaagcaatctgcctgtctcggcctcccaaagtactgggattacaggcatgagccactgctcccagccaacagataatgtatttttataagatgtgtatgtcaagactcaaactgaaattattaaatgtttattagtcagcatcagttgggatcaaaatttccataatggtaaagtgaatttttatctagaatgagtctggtaacgttttttctagaatttaactggagcatttacttggaagcaacagtgttctattgattttaaactttattatgtttatattttgttcttttttccaaagcatttttcttctttrcctattttttgactttttaatggatattaatatatgtaaacccttaaactgcagtactggggaacattgtaatttattcttataggatgaattaatgtgatttctttttgtgataacattaatgttcccaaatagcccacatacttttctgtaatacctgaaatacgaatgagaaataagatataaaactcatgattcttttatgtattttatcaacttttacagagaggtgaagattccagtttaaggaagaaagattttcaaatactttagattaatttgtgaaaaaaactcattttaattttaaagtagtaattctgtttaaattatacttaattagtactttatttttatggtggttaaaagttcacctctgttgtaattctctatgccaaagaattgtacactgctattgccttcttcggttaactctaaaagaagttcagtctgttaactaaatccaacagtgattcaggggtagaacttgctagaaatttagatgagactagggagcaaaggtttacagtttaggaattagataygatttcattctgtgagcatatccagaagaataatagaagcaaataaatttctgtaattgacatgttggccagctggacataaatttactcattgtatttatgtgtaggtcatgtgaaatattagtgtatcatattgaattgatttcatccatgtcaggccaagtaaagaagcctttcccaaaatcatttcttggaaacgatttaaaattacaaagatgggcatggtagttcatgcctgtaattctaacactttgggaggccaaagtggaggattgcttgagaccaggagttaagaccagcctgggaaacatagtgagacccccatctctacaaaaatatatacatatatattagtccagtgtggtagtgtgcattgtagtctagctgctgcggaggctggaacaggaagattgcttgagcccaggagttcaaggatacattaggctatgatcatggtcactgcactccagcctgagggacagagtgagaccttgtctcaaaagaaaaattacagattttctctttgtaattaatatggtactgatttttaacatttattcctttttaatgcacacacaacaatttatctttggtaactacagagtgtaaggtattaggtgaagactttgggagagatttaataggtctttcctttcctcatgtttccaccaagtgatttttttctttggtttattctttgatctaacaagtttggttttactaaacaatttttgttgccttcgttatgttatttcagcamtcagcattagtcataggttttttttctgtgtgttcattgaatacatgaatgatccacccttttactttagagaaagaatataatgtataaatgcaacttagcaagtttctttattttctttagccttggagggggtacctttctgggtttatgcagtttattgactggctgtgaaagttttgaagaggctcttgaaatggcatccaaaggtgatagcacacaagctgacaagctggtccgtgatatttatggaggagattatgaaagatttggtttgccaggttgggctgtagcatctaggtaagtttaacatttgtgttatttaagttacagaagttaagtaattcaagttgcttatgtttttggaaagcaatgtamcagaaagttgtaagggtgctttctcttatccagtttaggttccaagttttgaacattgatgtcatttaaaaattaagtatacattaagaagtttaccctgagtgcaccttgtaagaaacttttttttttttaatttttgagtgtctttccagtgtttatgcaaatacaaatacatatttttacttttctccccatatacaaaaggtaatctaccattatatggcatactatatatactctaaagtatccatatagaaatctttacatgttgttgaccttattttatacaggtgtaggataaattcccaaaagttggattgcaaatgcatttttgagatattgttaattatrcaaaagagcggtactgtttttcactctcaccagcggtaaatgaaagtgcctgtttcaccagtagagtgctaacttttgcatttttgctaatcagatggagaagtggtatcttaatgtaattttaatttacatttctcctaccaacactggggttaagagccttgcatattttattttctgtgagttattgttcatgttctacttttctgttggattgttatacagttgaatttatcagtcttttcttttatggcttctggatattgattcatagtaagtaagtcttctacattccaaatatataaaggaataaacccttattttcttctgatatgttaatggtggtatttttatacttaaatctttgatttacttatagtttatcttagggtattttgtgagttacagatcatgctttcatttttcaggttttttgtttttttttccagaaggccctaatgtctaataatccatctttatttcactgatttgagatggcttttttacatatgctggcttttcattctgttgatgtaccagcattatactttcagctttatagaggcataaaaagtatgttttaatctctagaagggctagtttcactcctttgcttgattttctgtatgaacttggcaaacattttctytattacaaaaatgtttttggaatctcagtaagtttacatattaacttagggacaaatgatatctttatagtaagtcttgctgttgaagaacttagcttgtctgtttgtttaaggctacttttgtgcctttcacacatttaaaaaggcctctccaaatatgtccatacatggctttttaaattgattcctaaatattttaaatttactgttctgttgtttatcagtcttgtctcccattatgcttcctaaccattgttgcttgtgcaccccaagttctttgtcagggaatccagtgccctttgatagtggactttgtctcactcttcagtaatatctcctgcctctcccttgcatagacgcttcactccgaccaaacatcttgtgatttcatagatgttttcatttctcatttctgtgtgcctttaacctttagttgcctctgcctaagatttttcttctcattttttctggctttttctggtccttttgctctgaaagccctgcctcataccttcttaacttttttctcttaccactgtaataaaagatatttttttgtttgtatttccaaggttagcctttgtttggggttagcctttgtttggattttttccctgttactgttagcgcttctcttgctgtcttttgtatgtaggcctgcattgtccattacagtagcctctagccacgtaaggcacttggcttatgagtgccacatgttgaattgatgatatttggatatattggcttaaatgaaatgtacaattaaaattaatttcacttgtttatttttacctttttaatgtggctaatagaacatatatgaaattatatattactcgtattttatttctattggacagtgctgcactagactaattcactgtttgagggactatctgtctccagcacaaagcttggtatgtcataaatgtttcttgtgactgaatgaaaaagaatttgaagttaaagctgagatacttttggaaacattttgtaattttggctaatttgttttgaatcaggtttaagtgaagatattttggtaatctttgctttcttataataactaactatgctttttttgagatgtcattttaaccttaattctttgaaaggtattactttactcttgcatagattttttttgttagtttgttttgatcttatccctatgtgtttctactttttggtcctaattttataaaaatatccaggttgtagatatatctgttaatacgtaaaatgttgctttttatcagcagatttgactttatttttcatttttctgcagttttgggaatatgatttataaggagaagcgagaatctgttagtaaagaagatctggcaagagctactttagttactatcaccaataacattggttctgtggcacgaatgtgtgctgttaatgaggtaaaaaaacaaaaaacacaaaacttgaattatcaaaaatgtgaattggagtcctatatacacctagcagggcttcttcactttccctaaggaggcctctgggattgagatgtaacccattaaatgccaagactcattaggtatatatgttacgtatccagttgctatattacttttaaagaaagtagcagataattcaaattgaaataggagaaatttattcagaattttttttcagaaaaacacaacctaaatcccttgaggatgtaaaagaaagttctaagcataagacattttgagatactttgtgaaagcattttttttagtcttaattttgcatttggaaggcagctatgctcaccactataccaccagtgcttaatgttgcatttgattagtgaaattcttggaagttttcttactgccctcggcttctttacagtgctgccttgttgcatatggatcaagcagcattgtacagggctatgaaggcattgagacctgttcttcatgatatttgagtggtgtttattgttacaagaaaagtgtgaaaaggatatactgttagattgaccatatagttgggattctttgtttggaagagaatatatatatttaattctagcttccttatataataatagatatatttgcccgtttaatttttataaatatcaaatactttaaatggattgggaagtacgcttttcgaaggaacccttcatttgttcattcattcatttattcattgagtaaatatttactgattaccagatgccagacatcgttctgggtatttggaacatattaatgaagaaaacaaagatctggctttgtggagcttgcattcattctagtgacatattaagtaaattgtgtagtgtgtattaggtgataartgctatttttttaaaaagagaccatcaaacaggataaagaggattgggaatagggcagagagtggtagaggacaaattgctaagtaattgagtggttaaaggaaagctttattgaaaatgtgattcttaggcagaggtttgaaggaggtgagggggaaactgtgcatgtagacattttggggagaaagcttccagcagmgagaacaaatatgcaaatcctctgaattattctgtatttaaatccagaacttggtctcatcagttttttaataacttagaaacttaagtgttagttggttgatggagttactagtagaccatgttgggagctgacaacaatttgagacctttattcttagccctttatgtctaaatttccactgaccaattgagttaacaataatttaggccatggtttacagtatcccaacttatgtacaaagatttctactcaaaagtcagtatagtgtgagagtcgaaataagttttctggtgattcaaacaccagttcccctttgtaagatttcctaatcatagagataatctaagaaaccaaattagtgtggaatctttgcagagagagaatgatttgatgaatcaggcaggggacggagaaagaatgctagaatcctaggggaatgcacatgccagtaccccagtcagtattactctccaattctgtagaatccacagttgcatgtcattgttcaacatgcattgcaatgtgtgggccaagtttgctacttatcaactaaatgcattttatagtacttaccatgttttgatttttttttttaatcacatcagtaatgtgtctccaaatgactttgtaagggggctatttattggccattttcaaaaacaaatctcacctgaaatcatctgctagagtctttctggaacctttttttaaaagtagactttattttttagatcagtttcaggttcacgtaaaattaagtggaaagctcagtgagttcccatataccaccttccatacacacacagcccacttccatcctcagcatcccatagtagagtgatcatgtgttacagtccataaccctgtgcacacatcatcatcacccaaagtccataatttagggttctctcttggtgttacacattttgtggattttggatgatgtgtgcagaactaatttttaaatattcaggattatacagctatatgccaggaatgtagtaggtgttatactaataaagsgtagttgtgtttttttgcattttaaaataaattttaaataaatatttagaaaccttttatattgtaaaatctattatttttacaagttttttctttgttcttttcttttagaaaataaacagagttgtctttgttggaaactttttacgtgtcaataccctctcaatgaaacttttggcatatgcactggattactggtcaaaaggtcaactaaaagcattgtttctagaacatgaggtatggtaggaaaatgttttttgtgaattttaatagcatgttttttaagagacagggtcttgctctgtcactcaggcttgagtttagtggcacaatgatggcttactgcagcctcttcctcctgggctcatcaatcctcccacctcagcctcccaagtagctgggaccacaggtatgcaccactgtgcccagaaaatttatttttattaatattttttgtggagacaggatcactctttgttgcccaggctagtctggaactcctggcctcaagcaatcctttataggtgtgagccaccatgcccagccttaagtastagaatattggttccttcgcttcagtttcagttgtggggaagagaattacaataacctgttaggcacccccagatttttttktattcatttactacatgcagttaarttctgatctgagcaattatcagtccacataatgttttggattaacttaacttgaatcattttgtgatcaaagtcaaatggctgtatcattacaaattagtaacagagattcaaattattctgctcttaaaagcttccatgtcttggccgggtgyggtggctcatgcctgtaatcccagcactttgggaggccaaggcggacggatcacgaggtcaggagatcaagaccatcctggctaacaacggtgaaaccccgtctctactaaaaatacaaaaaaaaattagccgggcgaggtggcgggcgcctgtaatcccagcgactcgggaggctgaggcaggagaatggtgtgaaccccagggggcggagcctgcagtgagtcgagatggcgccactgcactccagccactccagcctgggtgatagcgagactgtctaaaaaaaaaaaaaaaaaaaagcttccatgtctcattgtcactgctcacacaatacaaatcagaatggtgtgcccttgtgcaattccacatggcatgcagtgagagtgtcaggcacagccacaggaagttagtttgttttattaagtaaaggggagagggtgcagaattgctgttacagtcctggaagctttagtgtctaaaggccacacttttagaatacgtatttcagtgtgagcctatagtcccagctattcaagaggctgagatgggaggaccatgtgagcccaggaattcaaggccagcctgggcaaaatagtgagaccatgtctctaaaaataataataataaataaaaatacatatttcaaaggtgtgtagacatcaagaatacagattcagaaaattttttataatagctaacaacgcagaaattggtaggtttccaaatattattaaacraatagattgtgcatagttgtgtgttctcaagtggttaatattatatgctaacttaaaagctgtactacataacagttatttttaaattacacagggttactttggagcagttggtgcacttcttgggctgccaaatttcagctaaagcatcaggtctctctctctgctaataaatgtcatccaagaggaactaaaaccagaggcattattactgcattgtttgtcactgggaaccaaaggataaaagagtagcataagctgctgaatgttgccatattaaaggagagaacttggtaacgtgaagtatttctcattgaaatgctttcccttttgtatatagccagtgttaaatccttaaatgcaatacagcctctgattattgagcttcctcttaaaaagatttttttattttatgtagccaacattgcagtactgtatgctcaaacacaaatcttaaagtatcggaactgtttagcttatgaaaataatcgactctgaatatttgttacaagtctgttttatgtgttttgattactagtgagcagaaaataacataccctgtattcaaaattactgaaatggcaatcaaagatgatcatttttatgtgattttagaaatgttaaggcaatactactaattattgtaggtttttttaacgtatcacccaaagcatgtatgtgatctttccccattagtatctttttctcaaatgccataattaactgaaatactattattaaattttcatgagaattctaaaatgaatcctgggaaatgcacgtttggtgatgttgcactttctgtattttacaggaattagtcaatacatgttgaaatgtttaacattttaagattggaggcttaattactgggagtctgtctaatgaagtcctgggactattgtaatggaatatgatttgagttcactgtgctctttttgtttgtttgttttggtcatatatacattcagaacttttattttaaaacaaccacaataacattaataatagaaaattcatctgtaaatattcacagtctagtcactgaaaaatgggaaaacctctaccatgccttattattaccctttgctgtttgaggagccagaaatagaggtgcagttagaggacggtcactttttccaacaaaacccactccatagccatgtggatttttatccaaaggctcaacaaccagagggaatggtgagacctgataactaaaatactgttattggcaagggtttgaaatgtgtaagaacctaggagggaaaggaagattgagcaacataggaaaaggggaagagaggctgagtgtcaccaaggtccaaactccatttataaaaatactgcaaaaccaggagttgatggtagaartgcatatgatccatggcaggagtaaatctctccacctcctctaactctctgaaaactctagagttggagcaagtcttccatttgcttcttatccccttaaaagaatgccttccacttcccaacagcccccatcaagggaccccaagaggccaccatgctcttatctcgcactttctttcctattccccttgcctgaatctggagtggggttgagccctctgccttcaaccttaagatttaggaagttctttccccaactgtctaacttggaaaggtagatgagtctgaattttgaagtaacraatgcaaattccactcagcagaggcaatgttatttatgtacatagggatagtggaatgagttttaatagattctgtccaaaaggggtttgttcctcttatttcctctatgtaggaagttgtgtcttaggcaactttatcagtatcaatggaaaaatgataggcactacaatgaaatggcaggatgccaatatgagatatttcaggaataataagaaatamagtttgtttgtataaaataaactatctcaagaaagttttcaacgacagtgatagtgttcatttgtaagagagagttctagaacttcgatgtccagtgcagtagccactacccatatgtagctgttgagcatttgaaatatggttagtccaaattgagatgtgctctaaaggacaataaaaggttaaatatctcctaattttttgtattgattacatgttgaaatgttaacattggaaatattgggttaaagaaaaatacacaattaaaatgaatcttggccaggcgcagtggctcacgcctctaatcccagcactttgagaggccagggtggkcaggtcacctgaggtcaggagttcgagaccagcctggccagtgtggcaaaaccctgcctactaaaaatacaaaaattagccaggcatggtggtgcgcacctgtagtcccagctacttgggaggctgaggcaggagaattgcttgaacccaggaggaggaggctgcagtgagctgagattgtgccactgcactccagcctgggcgacagagtgagactctgtctcaaaaaaaagaatcatctgtttccaattatttttaaatgtgcttactagaaaagataaaatcacacatggtttacattttatttctattaagacagcaccgttaagaacatagagctttgaggaattgtggtattagaaccaaatctatttaccacagtgagcttacagggagttactcgagatcttaataaaaaattataatctttggcagccttcattatgattttgtgttcttattattccagtacctctagattacatatgggaaaagctaaagagccacagtggtgagatggttgctcactctagcaggtaatttcagtttgaaaggataaaatatatgaatcatagttcacattaaccaaagtacagtgatgaaataacttagactctgaccattccattttttcttaaagattgccctaaatctatagatgctaatacagtatttgccacaggtataaaacttgtagttactgtcattcaattaagattcttatctgtacagatatacaaatcagaaacttttaaaataaattgaactaatggaattttggctccaatatttagtcactacaatggaaatattaaagcaaggaacatgaagtcattgtagggttttaaaatggctactgactgacatgaattcagagtttcaaacagtctaaattctaaaaacttaactttacacgcttttcctcctaaataaccactctaataattcatacattcatatcttcaggtaaagaaaactgaattttaaacaattgaggctgggtgcagtggctcatgcctgtaatcgaatataaggacttgagtataaaatttgaaaactacatggggaaatgtctttatcatgcatctcttgatagtctactgaaaactattaagtaaacctgcggtctgtaaacaaaaaaacccatagtgatacttaccttgtgtaatgtaaacaattttttaagctctttaaagtacatctagatttactggtaatgtatagaagtcaattttatccccaagcatttctacttcctaaaccattagcaagagtctcaaaacaacttcactaaactattggacctccagtgttaacttgccaacataaaaatctgaaaaactttgtaatcactatcaaaaatacaaaagagagaataaattcccaggtaaaaggctttacaaattttggaactattatgcttttgtttactaaacactgatccttttagtaattctgcagtattgcctcagactcccacaaagtttcaaaatagctcatctattagattcctgtaacatttatttgggataaacgtggttttgttgccgttgttcataatagaataaaatatttagctttgatggttcagatgtaatacaaagaaataactaagtttgggcctgagataaatgtggtaaagcaagaatgcagagatgctgtaatgatgagtgagttttatagcattactgaggacctgaaaacttgctgccaaggacactttgaaggttttgttggctggaagaagtgtctctggaatcccactcctagctcttcttgaatatttgaaaagaattagataagggccatggggacccaggtcaccccacctcttcttttcagtttggctacaacattggagtcatcagtgctcctgagacagtcatacaggactttctcagttacactttgaaagagaggtcagaagactctccctctgaggttttgctcatgtccccctggccctygtctgtggccatcttccccaatggtgatatgattggctcctttctgttgcactctttgtcaaccactttggcaggtgcagttcaatgcttatcataatttgttggctattactggttgccttatgggattctgcagacaagctgagttggttgaaatgctgatcctgggccactagattactggcttgtaatgcggactctgcacaagttttgtgcccatgtacattggagagatctcgcctactcccctttggggtacctttagtgctctcaaccagctggacgtcgttggtattctggagatccagatctttggtctggagttcatcttggggtctgaagagctatgcccagtgatactgggctttaccatccttccagctgtcctataaagtgtagcccttccattttgccctggaagtcgtaagtttttgctcattaacagaaaggaagagtactaatgagatccttcagcaattgtaggggactcaggatgtgtcccaggacatctaggagataagagtgctaggatgatacaagaaaagcaagtcactacactggcgctctttagagtacccagctaccaacaacccactgtcatttccatcatgctccagctctctcagtagctctctggaatcaatgttgtcttctattactcaatgagaatcttcaaggatgcaggtgttgagaagccaatctatagattagtgcaggagtggttaatattatcttcttgactgtagtctctctgtttgtggttgaaagggcaggaaggactttacatatgataggtcttgaggcatggcgttttgttctgtcctcatgattgtttctttgttattaaaggatgagtatggtgggatgagctttgtctgtagtggggctatcttggtctttgtggccttctctgaagttggaccagactccgttccctggaatactgtggccacactcttcagtttgcaatagcagtggctggttgctccaactggacctccaactttctagttggattgctcttcctgaacaattattatctagtttaagtgtgttgttgctttagggtcatggcatgcttatgtatttctgttaccatctgaccatggtactatgccaagttctcttaggggacctgaatctttccagtagaccacatttgagagagtatgagtcaactgggcatagttcccaacaacccaaaatacatacgtacttcactgaagcagatctcatgattccattgacttcatttctaaaattggactttgagcagccaatttctaaggattaaaaagaaactttaatgcattgtagacctctgtacacagaaaaatctttgtaacttttgggcttaattttcattcttaaaaaatctggtaactttttcaaatgcaaccactgtcagtttgctgtgaggctaggcaaacaacacaaggtatagaatttcccatcaccaccaccctgaccccgcgagaagattgccttttaattagagacttgtagaactagtgccttttaagttctacactcatcttttccaaagactattagtaaacttgccatgtaatttgacatggcagttccttgctcagctactctaaataaagttggaaattaggtggtctcttagtttgggtaaagtcagtactattgccagtaatatacatggtaattgaaagcccttaaagtggttcagattatttgccaaatattagactctataaaaatttctgaggttttttttcttttacctttgagtgtacatgtgattgctataatgtaaataccagtcccttaaasactgtttctataagcagaatgatgcagcacaaagtggaaaggttttcctcttattccagcagtattcttgccttcaaagagtagtccatcttgccttgatttttaaggttgttttcttggatggaaagcttaactggatagtaatttccatatgttctttataaccactctgtatattataagcaaagttttttcatattgtatctttttctgttgagcactttatgcattttaktctattgcatttgagaatgtagtttagaaattcactgtttaaagccatgtgaaaactgatagaggataatgaaaatgagtgtacattattttgaatttaacttaactgttttgtggtgggtgtgaacaaaacattagaaatatattatctttttgtgataatactctctgacctcacttaaagtgatctgccatgaggtatccatgatcaagtttatgtttattctaatacctaaggaattcagccaactttgtttctatcatcagataatctcagaaaatagtgtgttttatctatattactgcctcttttcaatatttaagagaataattgtcttctggtttctactgagcctagtaataatcactaaagacctaaaaaaggaattccttctgttaagagtatttggatagcccattcacgataatggtggtgtgaaaatcaatcatcccagcttttctgacatatctaaattttgaataattaatttccacttccaaaaaattcaaatgttttctcaaagcagtcactacttatttgcattattcctgcatattcagtgaatgtgaggtcatatttggtattgtattagaagtagtgttggtcactggtcttgcctctttgaacattatttttatttgtaaaatgagggagttggtttgttatgatgggaaatgagtcagttttcagggtcctgagaaaattgcttcattcatggctgtgtttgagataactaaagtaaattttttttcaggtatttggtgtcatgttttggagttaatatttagtgcttatataattttaagttattacataatttttattggtatatatttgataggtactaggtattggattctcaccaaaccagtagaatggtattctctcttaatatgtgattgcctgtaatggccaggtagatataccttaaagtaatatgaaaggttttatatgtatattaaaatgtttgtacttttaaatctgtaaaggttatctggaatttttactgtgttaacttcagaattatatgggcattatgactttttcattgtacaaaaaattattcataaatgttagaatacagatgttccttgacttacaatagggttatgttccagtagacccattgtaaattgaaaataccgtaagttgaaaatacatttaatacgcctaacctactgaacatcccagcttagcctagcctatcttaaatgtgttctgaacacttaacgttggcctttagctgggcaaaatcatctaatacaaaacctattttataatgaagtgtttaatatctcaaataagagtattgtaccacatatcgttatcccaggataatatcagagtacaaaatttgaagtacagtttttaactgaatgtgtattgcttttgccccattataaagttgaaaaaccataagtcaaaccattgttaagtcggactgtttgtgttacatatatttgggattttttagtggccctttttaaaaagctgtttcttatttctgatcattgtgagtggggatagatgtgggaagaaccatgtctctactaaaaatacaaaaaatagccaggcttgttggcacacacctatagtcccagctactcgggagaccgaggcaggagaatcacttgaaccgggaggcagagggcagatcatgccactgtattccagcctgggcaacagagtaagactctgtctcaaaaatgaatgaatgaatgaatgaacgaatgaatgtactatgagctgatactgggatttcaggtaccgcagtttgtgctgaatgatatgtttggggtaaatcagtttttttcttatagaatttcggcgtttttgctgcaactgccactaattttgcatttaaaagaacaaaagaggaatgtatttttcaaaggagtgaatgaggttaaaatcaagattttgaatggtataaatatgcaactaattcagttgtaggatattattaaattttttattgctaaatatgtttctttcatacgttgcagtgcttacagttccaacagctttccaagaaaacatttccatatttgtgttatttgtaaagtatacataaataatgtaaaataatttgggattatttcaactttacattgtatgtctgaatttcatcgatgttgtacctggctcagtcaatagttgtcacaggtattaagccattttggaatttgccacttttttctgggtaacctgttttagtttagtttacagcatttagaaacagaaggtaactttatagaagtaacaccaatatcctagtctgcttgccccgaatataactaatagtattaggatgtaagcaatattaagatggtttttattattttttatacactgtgtgcttttactttttatttaaactacagcaaaaaactgattttttaactaaaattgaatggcgtttatcttaatgaccagttattgaccaaagtgtactcagaagatgttattatgtcccaatctaaggaatcctttaatttggggattaattttacttacacatgccatttcagtttcagttgcctcattctattacatcattcttgtcaagtctaagctttatcatgtctgaattcttttaacactgaatctgtgatgtaaaaatgtatgatgtgccataaattttattcataataaactaagttatagcctattgtaatctgtaaaacatttcttgtaaattacctaatttattttttcatttatgtacagtatcttatgtaaatttgaaaaatgtttgccatggcgcattctgtaaacattcccgtattcttttccttaatgcttatttgcatgaaggtaacttgggttttgcttgtttgtattggataaccattaagccaacttcagtttctctgcctttttttctgtagtttaaccatttctaattttgttcatattctaaatagatgttagaatcatactttttattttctactttctaaataaattatctaagttgtttactatgtgtgcctttttattatttaacttacatattcccacattttcactgtgattaaatgcaaggttgtggttagttctgtgagagcaagaactttgtaaagtcttgttcacctctagatccccagtacctggcacagagaaggcattgatgaaattcagggcttgcatttattaagatgtgaaaacttgcccccctgagaccatgttatcctgcatcagaaatgaatgttgttggctttttggttttgggtttgtttttgtttttgtttttatatatagtctctttgttgactgagctggcgtgtagtagtgcagtcatagctcactgcagcctcagcctcccaactagctgagactacaggcatgcaccaccatgcctggctatggttttgtttgttggttaggtgtttgtttcattttgtttgtgtggtgtgtgtgtgtgtgtgtgtgtgtgtgtgtgtaaatggggtttcgccatgttgtccaggctgttctcaaactcctgggctcaagtgatccacccaccttggcatcccaaagtgttgggattacaggctttatggagtatgtgagatgttttgatacaagcatgcatgtgaattaagcacatcatggagaatggagtatccatcgcctgttaagtttgtttaaaaaaatcatcttaatatgtgaggcagtaagttggaaacttgatggctgtgttttcaaattgtatgattgtcgtggctccaggcatagttttcaaatcatattattgtctttacttggagcgtagaggaatagttgaaaacgtgaacatgactaccatgtgacatgtgaagtacatatcttttatttaaaaaaaattagcaagaactaggatgaaaaaaatctaagatctggactaaaggagaacatgatgcagtatggaagagatttgaggtgtagtttagctattcaaatgtaggaagtactgctgtcgcaagcacttagaaataagctcctaaagagcatacattcaaggctacacacttaagtctttcatttaaataaactttccaaggagggaaaagtctgtactggagtcaatacacagtgctatataaattttgaaagtggccaggagcagtagctcacacctacaatcccagcactttgggaaaccaaggcaggtggatcacttgaggccaggaattcgagaccagcctggccaatgtggcaaaaccccatctttactaaaattacaaaagttagctgggtgtggtggtgcacacctgtagttccagctactggggaggctgaggcatgagaattgcttgaacccaggaggtggaggttgcagtgagccaagatcgtgccactgctctccaacctgggcgacagagcgaaactctgtctcgaaaaaaataaattttgaaagcaggatgtctactttctatgatatagtccttaatgagtgtattgtgtactgaacaaactttaatatttctgcatttaaaaatctattgatcattttctatggtaatactataagttcctattttaagatattcctatacatctggttttggtgggtggagaggagtttaagatttgactttttccctaaagtaaacctggaaaacctgactagcttctggaactttacatccttttcatagaaaattggtactttctgatagtttttaatgttacccagaggttaacaataccccaaaagtgcagttgaccatatgtttaggtaagtaagtgcttatccccagccagggctttaaacataacctttacagtttctggaaacagtagcaaaaattaccaaaactatgaaggcatattctttttgatttaagcccattttcctcattttcttctagcaagagtttggagtccagccaacccagatttctttgaaaacaaaaaaacacaaaacattaaatgataccactaaaagaattcaagcacctggccaggcgcagtggctgactcctgtaatcccaacactttgggaggcccaggcgggtgaatcacgaagtcgggagatcaagaccgtcccggctaacacggtgaaaccccgtctctactgaaaatacaaaaaaattagccaggcgtggtggtgggcacctgtagtcccagctacttgggaggctgaggcaggagaatggcatgaacccgggaggcggagcttgcactgagcctagatctgtgccaccgcactccagtttgggtgaccgagcgagactccatctcaaaaaaaaaaaagaattcaagcagctgaacttgaaaaaagtaacttggccctccatatctgtgagttacacatctacagattcagccaactgtgaattgaaaacatttgaaacaaaaaataatacaacaataaaaataatatatggaagcttgatgagaacacctggacacaaaggagaatgacagaaactggggcctacttgagggtggaagctgggaggagggagaggatcagaaaaatatctattgggtactaggcctagtacctgggtgatgaaataatctgtacaataaactcctgtaacatgagttaatctgtataacctgcacatgcaccctggaacctaaaataaaagtttaaaaaataatgcaagtaaaaaatacagtataacagctatttgcaatgtattaggtattaaaaataaggataatttaaagtatataggagttccctagcaagcagactcagaaggggaaaaaaaccatataggaggatgtgtaggttatatacaaatactacgcactttatataatggacttgagcattcatgaattttggtatctgcagaagttcctggaaccaatcttccatggatagagagacaattgcacgtcatatagcagcttttttagttgtctcattttgacagtttgaataaaatattctgacaccttgtgttttcagatttcctaaagcacctttgcaggttttcgggacaaacctgcaaagtttattacttcaaaaatgatttcagtgaatttgtaattaatcttgctgattttggtttagttttgggtttggacctatttataatcaattttattgaggtatggcttatacattaatattctaactgtacatttaaataagtttgataaatgtgtacacccatgtaaccaccactccaaggtatttgcatcattccaaaaagttcccttcctccatcttagtcagtcccctcccatccccatctgtaagcagccactgattcgctctagataaaatttgtcttttctagagtttttatgtagatatgtagactacataaaaagtcttatgtagactagataaaatttgtcttttctagagtttttatgtaaatggaccaatacagtagatattcccaatctctctttctctcccagccctagacttcatagagctactgtctactttctgtccctatagatttgctgtgttgtgtactcttgggtctgcttcctctcagcataatggttttgaggttaatccatattgttatcagtacttcattcctttttactgctcattaatagtccattggatgaatatactacaatttgtttatccattcgcttgtacatttacatgcaagtctttgggtggacctatgtttttatctgggataaatagtgaaattgctggattgtatggtaactctgtaagaaaatggaaaacagtttccaagaggttccattttacattcactccagcagtgtctgagagttccacttgctctgaatccatgtcaacaattggtattgtccgtcttttaaattgtggccattcttacctgtgtgtcatatggtctgtctgtgcttttaatttgtgtctccttgattactgatgacattgagcatcttttcagatccttattggcctttcatatatatcttcttttr

SEQ ID NO: 94188 - DNA, 16429 bp, Homo sapiens
  misc_feature (1)...(16429): n = A,T,C or G
ccccaaattggggcaaggatcacaacaggtttctgctcactttctgaccaaatcaacaacagcttttgactcaaagccagagtctgaccttgctctgaacatatttcctaggcattctttggtttcccagtctcctagtctctgccttggacttgaccccttattgacatttcccaacagatatgccaaaaatgggttatgagtgctggtgtatagatccctcagctgttggagctttcaggtaggacctgtggtagacagagcccctcattcagagatatgggccacactgatggctacagttcctgttcttccctctccaacaccccatgactgtgtcaaccaggtatgatgccctaaataattcagcccttaagtctaacttcaaacactctgctgaagccttggcccattacttttaaattttctccccagggaagaaacagaacattctaggataatttgtctctgaattccagcaatacaggtatgttttcagattccctgggctgaggcggagaagcaggaagcaggctttttaaaggcaaggggtgggagagacagtgaataaaaacactctagaatcaagaggctacttccttggtaatatgaagtgagaatcttggctttatacctgggaatgaggaggatgaggcctgaaagtcacccttactattcaaaagaggcaatgtagattgaagaatgagactaccagaggagtaggagaaaatgcccctcacagtggttatttttttcaggccagcatggctgaaaccaatacgtaatgagatgaaaggaaaaaaaatatgtaagcattaaagacaaaggagacacaaaagcataggcattggggagggcagcaatcaagataacacccaaaaccttacatttgaatagtactttacagctgacaaatctctttcaccttccttctttaccctctctggggcagacctgcaaagaatccatgtgtgaggaaactacctgaggctagagaaagaaccatctgaaagaattagagataacagtgcctagcactcatacagttagaaatagcacctgctcccaccagtcagcctggaaaacctcatggttcatgggatgttggatggagtacccagaagggtcagaagggtaaataagtagacttagaatgagaactgctctggtcctgcctagtacattttaagagaacgacctgaacagatcaatttttttccatgtaactttattgtgtctcagaataaagcttaagaatatttataggaatatagaaatatccacaactgacaaggtaaaactcacgatgtctggtatctagtaaaaaattaccaggcgtgcacataatcaggaaaatctcacctatgagaaggagaaaaatcaatcaatgaaaactgacccagagctgaaatagatgttaagattagcagacaagtattttaaaatggttattataattgtattccatatgttcagatagttaagaaataaaaaaatttttaaaaaatcccttgtacttttaaagatgaaaaacattagactgtattaacagtaggttaggctttgcagaagataaaatgactgaacttgaaaactgcaatagtaagtatttaaactaaaatactgagagaaaaaattaattttaaaaataaagcatctgtgagctatgggataacttcagacaggccaatatccatgtaattgagattccctaggagaagaggagggtattggaaaagatacctaaagatataatgaccaagaagttttcaaatataacaaaaactataaatccaagaaacccaacaaaccctcaacacaagaaacacaaagaaaactacaccaaggaacataaaaataaaataaagtggcaaaaaagggaaagaaaagaaaatctttaaagtagacagaggaaaaaaagacaagctatatacagaggaacaaagataaggatgatagcagacttgttattggaaacagtgcaagcagacagtggagcaacatctttaaagtactaaaagaaacaaaacaaaacaaataaaaaaaaacaaaacctgggaattctgtgcccagcacaagtattttcaaaaacaaaagtgaaataaagactttttcagatatacaaagatgaaagaatccttcactagcagatttgcaagacaagaaatgttaaaagaagtccttcaggaagaaagaaaatggtatcagatggaaatacagatccatacacaggaatcaagagcactggaaatactacaagggtaaataaggtttttttcctcttattatttgaatctatttaaaaataattgattgtttaaaaactaatgataacaatgtagtgtgggatttatggtacatatataagtaaggtatatgacaacagcacaaagaccaggaagggagggatggaagtatactattgtaaggttcctatactttatgtaaagtggtataataccacttgaaggtaaactgtgataagttaaaatactataaaccctaaggcaaccattaaaataataaagagttatagttgatcagccaacaaaggaagtcaaatgggatcataaaaatattaaattaatccaaaaaagcaaaaaaagggaggaaaagcaacagatgaaacaaatagaaaagaaaaaaacaaggtgatagatttaaatctaaacatatcagcaatcacattaaatataaattgtctaaataacacaatcaaaaggcagagattgtcagattagataaaaaagcaagtcccaattatatgctgtctacagggaatgcactataagtacaaagacacaagtagggtaagagtaaaaggacagaaaaagatacagcatgataacactagccagaaaaaaagctgggtggctatattaatatcagacgtagtagattgcagagtgaataacattaccaggaaaaaatgaataatattatcatttgataatgatcaaggggtcaattcatcaagaggatataataaccctaaacagttatgcttctatcaacaaaagttcaaactatgtaaagactgattaaacccacaaggagaaatagagaaatccataattatagtcagagattctatgccccctctcagtaattaatagaacaagtagacaggaaatttgtaaggatatagatttgaacactctcaaccaacgtggtctgacatttgtaggacactccacccccaccccaacagctgaacgcatattcttttcaagtgctcacagaatatttaccaagataaaccatattctcagccatagaatgagtctcaacaaagttaaagagatgcaagtcatacaacatattttctctgactataatgtaattaaattagaaatcagtaacagaaatattaccagaatactcacaaattattggaaactaaataacacatatctaaataacccataggtcaaagaaggtggcatcagttaaccaggtgtccatagtatgctatgcattgtgttaggttctttatcgacattatctgtaagcattgggatcaatcataagataggtattattaatttcattttacaaatgagaaaactgaggctcagagacgtaaaataacttgtttaaacaatgttttataactagaaaatggcaagccgagtctctctaactataacttccagtacttttcactgaaacatgtacttctccaaaactcactataaaatctccagctcttctgcttctttattactttgaattacattcattcttgggcctttggtttttaaattatgacattgtaattgtgcatgtgcaacagcctttttttttcttttgcaatacactccttttgtgtgcatgttgtcttctaaggagaattgtattcactttaaaggaaagagtccatcttactcatcttttctatctcaactattcctcgatgtacctagtgggcatagtgctctcctttcaatagtcactcaacccaaaaactctgcagttcagcagcttgtcagcagtaaggtgtcacatttcccagttccatttagcactcagaatgtgtttgccatgtaaatgaaggttaggatcccaggataaaataaagcaattcagttgagcacataataggtttaaaatatagtactgacatagcacattgtctatgattaaggagggtgatatagaaaaatgcttttcagttttcatcctagaactccaggaatatatttctcctccatctgttggctcttgtagtggggaaggggatgaattctgggaatggcaaagtggtctttggtggaaagaagtaagaagaaacagaggaaattacttctgggtaccagtgatggtttgacccaccacattacaactgctgaaagaacaatatcttcttaggtgccctgaataagggaacaagtaagttccctccattagaacaactttatgtccaaataagaagtgtctaaggagtaccctaaagagatgcaccttaaagttgaagactatgtatataaatcttcagttactaattgggactgatactaaaaataactattgcaggtgycaatacctcccaacacaagtagtttcggtactgagactatctctgaggacttaaacaccaactttatcacatttacataygtaataatcaccctgtccattctcacacatctctacttgctggagactatttttctttatatctaaaatgctttagcaccttttcctataaaaggcatatttttagaactccacattttttttaaagtaaagttttattttcctacagtccaaccgtgtgtgtttaggaaggtacatgggcctagaaattctgagaaaattatagtagttgttctttgctggggtgctctctttcactgatcccttttctttctttctcaataactctcttcatttacatattattgctttaaaggaccttcaaaatattccctcctgactataaactagaagctaaatatctggtcactctgaggcaggaaagcaaaagaaataattaactgttaacattttatccatgcaataacaacaacaataaaataccttgtttgtggattaaaaggcaaagtcaatcctagaggttgccaatactagttacaaggtataatttgacagataacaccaggtccagactgtaagaaaaatacagtccagattccagaaaacatggccaccctctggggcctgagacatatagcagggaaagattctgtccctgacctctccccacctagcccaccaaggaatggggagctgtggaaggcagagtcagggctgtaagctgggcctaggggagccaggactagcacttagaatgggacacaaagaagatggtgcagagagcaaggggactagaggccagaggttggcccagagctgcttcctgagacaaaccagagggaacaatagacagcaaagatagctgagcaattaggagaccaaaatgaggcgtgcgctatgcagacacggagctctgaagactggaggaaggcttcctccttttcccactgagcaggccccggatatagccagcgggtattcatattgctgctcggaagcaacccatctctcctggaatttgataacataatctccactcctctggtcaccctctcccttccctcatttccctctctctattggaaatggcaaaacaatgaaggggaacatgtagccacaacataaaaatgtggacaaaaatattttaaaagtgaagaagatagacttaaatatacagatgtggatacatagactgcccagtgaccccatctcggcagaaattyattcttgcatggaattcctgaagccaaagaaacaagcagttggtgagacagcatccccatggaacagaataaggctgcctgctgcaaggtttggcaattcaagaggtatggggggaaatgtacccacagcaatgttctctctcaaaagatgtaactttgcagtgttgctgtttttcctgttttctgtattctatgtttggctggcagtgggagggagtgggtgtcagagagagaagactgggctttggagagacaagacagttggcttgaaaatactgctgaaaactgtggggcttgtggatttatttttctctcctgttccattcctaacggaggaaaagaggaaaaggctgttcctgacgtggaaaggtgggtcagatggtgaggtgaccaaatcagagggtttggccacacttctgcttctatccctgttagcatagtgctctttcaagtcctttcaccctgttttggtcacatatatctctgttgcctgaggttatgcctatatacatctgtaggaagcccacagcctctgatataagagcaaaggtacctgaccctcttaaagacgatgctcctgctccctttccaccttcccagactctggactctttttaccttagaccattcatgctgctataacaaatgctttacaatgggtggcttatacataacagaagtttatttcttacagttctagaggctgagaagtccaagatcaaggtacccacagattcagtatctggtgagggcttcaattcctggttcacagatgatcttctcactgtgtctttatatggtagaaggaactagctagctttctagaacctctttaaaagggcactgatcacctcccaaagttcctgcctcataatacaaycacattgggaattaggtttcaatatatacatttggaggaaacacagacattcagaccatactgctacttgccctgggttttaccttagttaacctccctgggcttggtccacagattatgtggaacagagtttctcaacagtaacaccattcacattttgcactggataattctttgcttgtggggctcttgtgggttgaattctgtccctgcaaaaagatatgctgtagctctaaccccagtaccttagaatgtgaccttatttggaaataacgttgttgcagatataattagttaagatgagatcataccgaaataaggtaggcccatagtgtggtatgactggtgttcattcatatagaaagatgtccaaatgaagatacagacatacagggagagcaacatgaaagctgaggttggagtggtgcagccacatgccaggaaacagcaaagccactagcaagtcactggaagctaagagagaggcctggaacagattctccctcacagccctcagaaggaacaaccctgctaacactgcaatctcagacttctagcctccagaactgtgagacgataaatttctgctgttttaatctgtgcggattgtggtactttgttacagtagccacgggaaacaaacacgggctgtcctgtgcactgtagaatgcttagcagcatccctggaatctacccacaggatgccaatagcaacctcttccccagatgtaataatcaaaaatgtccccagctactgtcagatgtccaggtrgggtagaagtcggggggagacaaaaattgccttccagttgrraaccaccattttagaccataagaccatagaggaagctgtattgagaaagatcatacaaccttcccagtttacagtatttttctgataatccttcagatggcagaaaccttaaggaatcctctaatccgtggttctcacaggacagggggagggggttagggggttgagggccaaggggtatgagggataaagaaaggagcttggagggacaatgcagggcccaggctctgctccaggttatgtaaattaggatgggctgggggagggagttgcgggaatgtctggcagccacatgttttaaaagctcccaggtgactctaattgtagccactcatctaccattgaaaccactaatctaccattgaaaccgctcatccaagggaagggctcaaagcctgggctgaaattccaacatgagagaaatctagtcttttgccttgaaattgctcagaacttaggacagtgatctatttaacactttgtttggcagtttaaaaatagtaactgtgggttatagaaatgaaaaccagaaatgaccaaaatgctcaacaatacagaatagttcactacactgtgataacacgtgatagagtattacccactcactacaattatgtttttgaagaatatttaatgaaaaataaataataaataaaaaaaaataataaaaaagttcttaatgtaatgttaaatgaagaagtcagaataaaccaaagtatggttctaattttattaccaaaaaaacttactactgataatgataatgattatgctattatatcatattatagataagaaaactgaggattaaaaatgtaaaagaagctcacataaatagttgatgttgatctggaattcacatttgtttgatcctgggcaaaacaatcttagtattctgctgtgctaaatggaaatttatcaataaatattaataatgattatgtctcagtgatagagataaattttcttttccactatttccttgcttcctaattattccatggtgaatatgtattagtttcataattagaaaaaatggaaaaaatcacttaaatataaaaattatatgcagggcattgtttagaaattactccaatgaagaaaatgtggtacatatgtacaatagagtagtattcagccataaaaaagaatgagatccagtcatttgcaaaaacgtggatggaactggaggtcattatgttaagtgaaataagccaggcacagaaagacaaacatctcatgttctcacttatttgtgggatctaaaaatcaaatcaatagaactcagggacatagagagtagatggaaggtttttagaagctgggaagggtagtagggagttgggggtaaggtaggaatggttaagagctacaaaaaatagaaagaatgaaaaagacctactatttgatagcacaataggatgactatagtcagtaataactttattgtatatcttaaaacaacttaaagaatttaattagattgtaacttagaggctaaatgcttgaggggatggacaccccattctccatgttgtgtttayttcacattgcatgcctgtatcaaaacatctcatgtacatcataaatatatacaccaatatgtacccacaaaaaatttaaacatagtaaaaaattttttaaagaaattattccaaaaagtaagcagaaacatttgttttgcaaatgtttccttatttttgtaagaagaaaggtgtgtaagactattggtaggaaggtaaattagtatagccatcatggaaaacagtatggagtttcctgaaaaaaataaaaatacaattaccatacaacccagcaattctgttactggatatatatccaaaggaaatgaaatcactatgttgaagatatgtcttcactctcatgtttactgcagcactattcacagtagtcgagatatgaactcaaccttcaagatatgaactcaaccttcgtgcccatcagtgaataaatggatgaagaggayaaagggtcttcaaaaagttcataggaaatgtrtagtacttaaaaggaaactatgcatggatttcaacttttttacaccaaaataaactcatactaacttgtcataacatacctgaacaggaagtagtttgaggtactaagaaggataagacatcagtttcaaacagccccaatcagagcaacatgaattctgctaaaattgaagcaaggacaaacatcaaatttatggtgaagcttgggtggaagaatggtgaaattatttatgctttataaaaagtttatggggacaatgccctaaaggaattggcagtttataaatagctaactcattttaagaaggagtgaaataattttgaagatgaagcccgcagcagcagaccatccacatcaatrtgtgaaaaaaattaatctcgttcatgcctatgattaacagcagaaataatagccaacaccatagacatctcagtttgatcagcttacacaattctgactgaaaaattaaagtagagcaaattttccactcaatgggtgccaaaatgattgcacccagatcaggtgcagacaagagtagagtttttaatggagattttaaacaagtgtgatcaagatcctgaagtatttctttgaagaattgtaaaagaaatgaaacatagctttaccagtatgatcctgaagacaaacacaatcaaagcaatggctaccaagaggtggaagtgggagcctgtcaaagcaaaagcagactggtcaagagcaaagaccatagcaacggtttcttgggatgctcaaggcatttcacttgttggctttcyggatggccaaagaatgataatatttgtttactatgagagtgttttgaaaaaattacccaaagctttagcatgaaaatgcccaagaagcttcaccagacagtccttctcccctaaaactatgctcctgctcatttctctcagctaaatasggttattttttttttgagaattttgatgggaaatcattagatatccacgttacagtcctgatttgggtccttctggtatcttttttgtatcctgatcataaaaaaaatcttaaagggcatccatttttcttgagttaagaacatacattgacctggttaaattcccaggacctttggttctttagggatggactaaatggctggtagcatcacttacaaaggtgtcttgaacttgatggaacttatgttgacaaataacgtttatatatttttttatttttaattccattttccataaacttttcaaagtgctgtcatatatagacaatggaatactattcagcaataaaatacaataaaatggaatactattcagcaataaaaaaggagatcctgtcatttttgacaacatgaatggacctagaatatgttatgctaagcgggatatgccaggcacagcaagataaatactgcatgatctcacttatatgtggaagctaaaaaagttgatctcacagaagcagagagtaaggtggttaccaggggctgggataattgggggtggtgaggtggggggtcttgaggcgggggagttggggagatgttggccaaaagatacaaaatttcaattagatagaagaacatgttcaagagatctattgtacaacatagcatctatagttaacaatatatgtattcttaaaaaatcctaagggagtaaatataaagttccctcaccacaaaaatgataactatgtgaggtgatgcatctcttaattagctatacattattcttcaatgtatatatatttcaaaacaacatgttgtacatagtaaatacatacatacatgtttctgttgattaaaaaataagaaatttaaaagaaaaagagaaagatgtgcaagataactgattaccttgggagtctgaaattggaaagtgggagtggaggaataattagctctttacacatctttgcaatgttccacttgttattacaataaacaagactttctccaaaatttgaaaaacaccaaagaaattttaaaagggaaagataaggattcaatatagttttgtcaattgacaggtaaaaatgtgagtgcatttagaaatacaaataaatttcattacaaatatatttatcttaaagatgaatgcattttctagtcatgtagagcctgaagacacgaatgcttggagaaatacaataaaatagattggtgtaaggcaaaggacaaaagagtgtcctctccctctccctctccctctccccacggtctccctctctttccacggtctccctctcatgcggagccgaagctggactgtactgctgccatctcggctcactgcaacctccctgcctgattctcctgcctcagcctgccgagtgcctgcgattgcaggcaygcgccaccacgcctgactggttttggtggagatggggtttcgctgtgttggccggccggtctccagcccctaaccgcgagtgatccgccagcctcggcctcccgaggtgccgggattgcagacggagtctcgttcactcagtgctcaatggtgcccaggctggagtgcagtggcgtgatctcggctcactacaacctacacctcccagccgcctgccttggcctcccaaagtgccgagattgcagcctctgcccggccgccaccccgtctgggaagtgaggagtgtctctgcctggccgcccatcgtctgggatgtgaggagcccctctgcctggctgcccagtctggaaagtgaggagcgtctccgcccggccgccatcccatctaggaagtgaggagtgcctcttcccagccaccatcacatctaggaagtgaggagcgtctctgcccggccgcccatcgtctgagatgtgcggagcgcctctgccccgccgccccatctgggatgtgaggannnnnnnnnnnnnnnnnnnnnnnnnnnnnnnnnnnnnnnnnnnnnnnnnnnnnnnnnnnnnnnnnnnnnnnnnnnnnnnnnnnnnnnnnnnnnnnnnnnnnnnnnnnnnnnnnnnnnnnnnnnnnnnnnnnnnnnnnnnnnnnnnnnnnnnnnnnnnnnnnnnnnnnnnnnnnnnnnnnnnnnnnnnnnnnnnnnnnnnnnnnnnnnnnnnnnnnnnnnnnnnnnnnnnnnnnnnnnnnnnnnnnnnnnnnnnnnnnnnnnnnnnnnnnnnnnnnnnnnnnnnnnnnnnnnnnnnnnnnnnnnnnnnnnnnnnnnnnnnnnnnnnnnnnnnnnnnnnnnnnnnnnnnnnnnnnnnnnnnnnnnnnnnnnnnnnnnnnnnnnnnnnnnnnnnnnnnnnnnnnnnnnnnnnnnnnnnnnnnnnnnnnnnnnnnnnnnnnnnnnnnnnnnnnnnnnnnnnnnnnnnnnnnnnnnnnnnnnnnnnnnnnnnnnnnnnnnnnnnnnnnnnnnnnnnnnnnnnnnnnnnnnnnnnnnnnnnnnnnnnnnnnnnnnnnnnnnnnnnnnnnnnnnnnnnnnnnnnnnnnnnnnnnnnnnnnnnnnnnnnnnnnnnnnnnnnnnnnnnnnnnnnnnnnnnnnnnnnnnnnnnnnnnnnnnnnnnnnnnnnnnnnnnnnnnnnnnnnnnnnnnnnnnnnnnnnnnnnnnnnnnnnnnnnnnnnnnnnnnnnnnnnnnnnnnnnnnnnnnnnnnnnnnnnnnnnnnnnnnnnnnnnnnnnnnnnnnnnnnnnnnnnnnnnnnnnnnnnnnnnnnnnnnnnnnnngaagtgaggagcccctctgcccagccagccactccgtccgggagggaggtgggggggtcagccccccgcccggccagccaccccgtccgggagggaggtgggggggtcagacccccgcccggccagccaccccgtccgggaggtgaggggcgcctctgcccggcggcccttactgggaagtgaagagcccctctgcccggccaccaccccgtctgggaggtgtgcccaacagctcattgagaacgggccaggatgacaatggcggttttgtggaatagaaaggggggaaaggtggggaaaagattgagaaatcggatggttgccgtgtctgtgtagaaagaagtagacatgggagacttttcattttgttctgcactaagaaaaattcttctgccttgggatcctgttgatctgtgaccttacccccaaccctgtgctctctgaaacatgtgctgtgtccactcagggttaaatggattaagggtggtgcaagatgtgctttgttaaacagatgcttgaaagcagcatgctcgttaagagtcatcaccaatccctaatctcgagtaatcagggacacaaacactgcggaaggccgcagggtcctctgcctaggaaaaccagagacctttgttcacttgtttatctgctgaccttccctccactattgtcccatgaccctggcaaatccccctctgtgagaaacacccaagaattatcaataaaaaaataaattaaaaaaaaaaagaaatacaataaaatatacaatcacaaaacatataaaatgtctctgtagccccatcagacattacacctttcacagtttggactttatgacattgcttatcatagcttagaagaaacatgatgttggtatgacacacatatgcaaaaaaaactcactaaaaatgatcacctatgaagtcctagaaattattctccctaggcacaatgccagcattagttattcataaccctgaattgttttcctcagccatcagaagtaagaaacatgtcaaatttgaaagtacttaaaagtgaagcaggtgctctgatcacacccctagagcctatgtctgaagtggcactgtaagttttggttgaaagccttccctatcaccatcatataaatgtcaaaagccttagtgtcatggcatagaactaacagcagcacagaatgacaggcagggagtctggaccttgggttcctccatgtgtgaaactgacaagctaatatagatttaaatgcttaggccttttaaatgagaattagcaacacaaacatggagtaatgcaaagtgaaagggataacaggtaacactcagatctagaagaatcatcctctcttgtctagtctcattggttcactctaggattgggctatcagcatggctttagaaagccaagtccacttgtatctcaccttcctcaggtacactgttaaaatcatcatcatcatccagcagaaatgtaggtgtcaggcacacggctgctctagagactgtatagtagctgattaggccccgtggaatgcagactagccctagaaccatactgtagtgttgggagagacacaacagtgagtagaaatagaaaaacttagcttctgcagtggctctcagggtgtctctgctcatgactgggatttgtggacattgccataggtaccccccttcatttttaaaggggtgaattatgttcagaatgctcagtatataaggcatggaaaaacataaactgtatttcagagttcatcatcaataaaaacaaaaattgacaagtttctccttgaggtgcctagggttaagtcttggttctctacacaattaagttatacagaccccaaggacatgaaagaaatgaagggtgacagtagcacaaattagcaatataatgctgaggtcatacttggtaaaggagtgaccagggcaggagggataaggctggagaaattttcaggaagtgactttttgagccaacttaaaagcctagaatgtgaagccaaagagtagtctactaggaaagggaatggcaggggcaatagtacagatttggaaagctcactgtgggagcacagcagaagtgtctaacagctctccaggcagaacagctgtcctcagagaagcacggtttgagagtcagagaccccagctgcagtcctcactgtgggataagccctaatgagtggctgtctggtgtggaaagctggtgggagggagtcagaggagagaaagacaagaggaaggagacctatgctaatgacaaggccatctgcacacacttctcaaacagggctggattgggagatttgctttaggacaaaagagacaccacatagccactaaggactgttcaccatgcactgtcggccaaaacccagggccatctgggacctctggctccccactttcaaagcaggaacatgttcttcccacttcctttccttaggagattaactgaaaagacatagccattgcaacatttcctcagagcagagaagctgcaggagatcaaagtctccccacataaagctcttcagggaaagggcagaatccaaatagctgaagattggaccatgagacagggaagggtcatgaggttcaggctcccatcccatcattcagctaattttctgaaactcttgactgttcctgacattcacaggccaagagctatcttccatgaccacagactataccataatcctcacagtcacaaaagcctaggcaagaaccataagtaattccatatgaatccaccctccatatgagaaaaagaaaattaagcagtggtgttaatgtggatggtgacataatgaaacaagaacaagctggcttggaggcaggatctacctaggcataaataagttcacagaacccccaaaacgtagatataagaagcactgtagcactcccttgctgtcttgaagtggggcaacactgcttgctgttgagaggtcactgggcagggctgcccatttttctctgattagaagggcagggaaaagaaactgatggagaactctaaatgcaaagcatcatgctgtttccacttacaactgcttttgccccaaagtcctactgacctaaacttatataaataaacatcagaacagggagagattttgctcattaaatcattagctttagctttagaatgtggaaagtttcctggctaatcctgctacacatgggaatctggccctcaaacagtgaaagaagcccagggcatcaagagttcagttaaactcagagactggtcagcacatty

SEQ ID NO: 94189 - DNA, 12824 bp, Homo sapiens
tcccttagtagcaaaagcacttttgcaagaatctccagtgattctgaattttttatttaaataatgtcttttaattctccactctaactgggtctctgtagtgtatataaaaccatccattactcattacttgattatcttgtgccccccgtcaagatttaaaaaatatacatttcttgattttcatcctatatgtcttgctatgatttgaatgtccccttcaaaactcctgttgaaacttaatcccaatgcgcaagtattgagagatgggattatgaaaagtaactggatcatgaggactctgccctcatgaattgattaatcccttcatagagtaatggattaatgcattgtcatgggaggggaactaatggctttataagaagaagaagagatctgagctagtgtgtgagtctgccaagcccgctcacctgatagcctgcatcacctcaggactccttggagagtctacaccagtaagaaggctctcacagatccagccctcaacctgggcttagcctccataattgtaagaataagtctctttgctttataaattacctagtttttggtattcttttataaataacagaaagtgaactcatacacgtctccaccaagagcatgattccatcaggactctatccttagttctattatttcttttgttttattccctttctttgtgtgatttcattcactacatgttttttagttataatgattggatgctaatgactcaaaccagtatttccagcccagactccagtcttgatcttgagaatcaaattttagtcctttccaaatactactcaaagtttcctgggtaggaaactttctctccctcactccttcgcctcccctccgctcccctctccctcctcctccccctcccctccctctccctcttcttctcatcctccttcttctcctcctgcttcttctctctgtcgcccaggctggagtgtagtgccataatcactgctcactgcagcctcaacctcctgggcttaagcaatcctcccctctctacctcctgagtagctgggactacaggcatgcaccaccatgcctggctactcttttctgatttttttttagaaacagggtttcaccatgttgcccaggctggtctcaaactcctgggttcaagtaatctacctgcctcggcctcccaaagtgctgggattataggcataagcaactgtgcctggcctccttctttctttcttttttttttagagcagcacttattatagtgcctttataattgctcagttctaattcttgttggttaaatcaaaatttagaaccaaataagctacatggattagtaattcatttaagagtttgaagtcagattaatttgccattggtcaaatcacttaatttattcagctctcagtttcatctgaaaattggagaaggtggactggataattgctctagagctcactattagcgttacacttcttttttttaatttttctgttatctttttttaaaaaataaaaaaaatgttaaaaattatttaaaacaagagaagctttgcctatgaagttatggtatttcagtacaaatatataaatttaataaacttttctgagtgccaaattagtgtcaggcattggggtagacattttaaaatgaataaaacatgctaaagataagtagaaaaaaaattctaaagaaagtgatttacatytctatttaaagtttacattctccatatatgagttaaaaaatatgttctaccaagtcttaattgaaactaaaaagagcttaaaaagtgactgaaaaacatcataaatttattgttaagggaaccactgaagaaatgtataatactgaaagcttttataattttgaaacttcaaataaaatttgtcctagtttcaaagacttaagaatacagtcttctttaaaaaatatttggaccattttaaccactaaataattatttcatttttggtttgtcataaattttgaaaaaattaaggaaagtcagaaaataatactggcctaatattgaccagaaatgctgtaaggtcagataatgtcacctatctactcattttccatgttaatggagaggttatgaataaggcatgttgcatacagtagttcataagtgaaaaccatctgcaatagcattggacgctctgctggtgtaaagttatcacagtatttcagagccacatatatgaatcagaaatctcaggggattgagagatatttcaacttaactcttcacactggagtgaagaacaataagaaaaaattgtaactgatatagattgacaatcagtgataagggcacacattttatccagctatttttatggttttaaaacttggtcaaaattatgcagaaaatattacataaaatactgcaaaaaaatatataaaagtaagtgagatagggaactatttctaatagttgaagccatatattttaaatttttgtctttatggaattctaagcatagaaaatattgatggtgtgtgttatccctttttggaccctttttgcattcagggaccagaccttattcaacatgatattctcaatacatagcagagtatgtgcccacaagaaggtgctccaaaagctgatgaatctagttgcgctgaaagaaaacaggaaagaaatatgcgatatattcatgatagtaattactatgacaaaaataagtgtgtaaatacagtagaatctcttttaactggtccccacttaaataacccattggattaactaagaattatacttttcattataaaacataacactatgttgatcatctaaggaatgcccaaggctacttaattatattctagtattctcacatttctgctacccccagataagctgtatacttatcaagaatcatttttcttcccagatctgttttttttctaagtgtactttttattacttccttcattatttatataagctaatggaatatgagcatggaaagagagcggttcctatgaaaactatgtttaatggtttcaaaatactaataaaggcaagttacaaaaaatattcttgaattatgtgcagaaaaagaagaataaaaaagattgggagtgagaataaagatctctgaggactgtaatcttgcattgtttcacaaatatgtctgagttctcatttcacttaaaaaaaaacaacggggaaataaatgacaatacattatgagtatagtttatacaaggaaaggaacatagctctttaatcagcaaactcattgaaataaatttagtcctacttcaaaatattggaaaatgaacgacagcttaaatagtgtatctttataaaacatttcatgatttatatgacttaaatgatttttcttattaattgatcaattagactaatcatgttgaatagaatacttccattctatccaatttaagcatgatatatgataccaaaaatctattttaaaaatacttcccccgggtacctcttctttctggtaagtccatttctttctttttactcattctaccgtgacaacttggccatgaaatttatcaccccaggtaaaaatagggtacattcagcccagaataatgcaatcactgttcagtttcaagttgacttcaaagtgacttgtttttccccatggcaaaaacagttttcatatcctgactatgtcaacagcaatatcagaatctcaatattccaaagaattttgtacctaataagataaatgccagtgttggatcaaaaaatatgtatcaggtatgctttagttagtggcctttcaatcacttatagataattttttaaaaattctgttctttctaaaaaggtacttagaaagttttatttgcgttgtttctgaggtctgcttttaaaaatcatgttgtgatgcattttttctgctaaataccctgaaagttattccctctgaaaaggaattgctaacaggcatttgcatttggggagcgagagatcagattgctttgtctaagaagagagtagtcacgagaggcatcaagcctacacagagtgggagaggggtccagaagtactgagatgcctccagaggaagagctgaggcatgagggccaaacttgtggaggggctggagccattatggtgagggaataggtagagttggtacggatgccttaacatggatggtctatgttagggcctgaagggtggcatttctgagactgagaagttctgaagtaacaatggagtcaagttactggggaaagagaaccgctatactatgaatagtccatgagtgataagtccacgagcctcaagattcagcaacatataaggcaagatgtgaaaccacagctcagagttcagctgagccattactcttctggaatttatctgaaccaagcaagagcagagcaggtagactgggggccattttcccaaatcaatggagatagataggtatctctacgcacctaaagtagacctgcattgggaaggggaatgatgggacaccctttgagatgggttcctacaaatccattctcccctacaatgagtttataggaaatttaagtttttctgagattcgtttatggagaaataaggaatctgtattctattctttccaatatgagtgggagtgtatacatcatttttttacacatacacatacacactcattcaaatatgaaaactaagaaaaggaaatgaaggtattggagaggaaaaccatgtttgtctcttcatagagaaagcaatatgtattccactgattctgcagaaattgcagtgaacaaatatgtgtagtacttgccttggttttacctattaaaatgatctatgggcagttctgacaaatagaaactctctaatgtgcaccctcaaaatgtctttattttctgcttatttatttatttattttgagacaaaagtctcactctgttgcccaggctggagtgcagtggtgtggtctcagctcactgcaacctccgcctcccaggttcaagcaattatcctgcctcggccttccaagtagctgggacttcaggcgtccaccaccacacctggctaatttttgtattttcagtagaggctgggtttcaccatgttggccaggctgatcttgaactcttgacctcaagtgatccgctgtctcggcctcccaaagtgctgggattacaggcgtgagccactgctcctggccttcattttctaattttttaaagctcacggctgatacattgggccagtacatttaataagaacaatgacatctgatctcaggagacgttttattggaagagttctgttttcttgtgaaatgcataacatgtccctaataaaccagactccacctttttgagagcactaaggcgtattttaaagaatcaaatatttagcaaatcaacagttctatcatcatggtaccaaacaacccattttacttttttctccccaaatatattttttcattatctgagagcaaagaaagcaaattgttttctcatattctggtattagaggaatagaatgtttcatgtccaagctcccaaaattgcttttttttttttcttaaawtgatcattgttttttttttttttttttctgttttttattgtactttaagttttagggtacatgtgcacattgtgcaggttagttacatatgtatacatgtgccatgctggtgcgctgcacccactaactcgtcatctagcattaggtatatctcccaatgctatccctcccccctccccccaccccaccacagtccccagagtgtgatattccccttcctgtgtccatgtgatctcaacaaagggctaatatccagaatctacaatgaactcaaacaaatttacaagaaaaaaacaaacaaccccatcaaaaagtgggtgaaggacatgaacagacacttctcaaaagaagacatttatgcagccaaaaaacacatgaaaaaatgctcatcatcactggccatcagagaaatgcaaatcaaaaccacaatgagataccatctcacaccagttagaatggcaatcattaaaaagtcaggaaacaacaggtgctggagaggatgtggagaaataggaacacttttacactgttggtgggaccgtaaactagttcaaccactgtggaagtcagtgtggcgattcctcagggatctagaactagaaataccatttgacccagccatcccattactgggtatatacccaaaggactataaatcttgctgctataaagacacatgcacacgtatgtttattgcggcactmttcacaatagcaaagacttggaaccaacccaaatgtccarcaatgatagactggattaagaaaatgtggcayatatacaccatggaatactatgcagccataaaaaatgatgagttcatgtcctttgtagggacatggatgaaattgkaaatcatcattctcagtaaactatcrcaagaacaaaaaaccaarcactgcatattctcactcataggtgggaattgaayaatgagawcacatgatcattgtttttttaaaaaaatgctcttacataatattgtcagagaaatgtagcagtgaatttaaaacaaacttagaatctgtgaagactcacctttttgagaagactaccttggctgtgatcacgttctcctcataaccttcatgctaatcagacatggatgtttcctaaaagatacataaccctgagtcagttatatcctatttgatgtaagtaagaattacagattaattccagaaaaatccaagaggagtaaagttctttccatgaagctaattttgctaaaagaaattatttttatgtcctccactcttttatattattatcaatctttctaactttcttctattatactttctagtagttaatagaacattctctagttgcagttcagttgttttgttttccaaatgtgttttattccctgacctaatgggaaaataaaggtttgctttttcgctagcactacacttcccaggtagccatggtctcctatgaggtcactagaatagcacagagatgtagcatgttgtattgacttggttctcattatagctgttcaattcaatggttgtgttttttttccccaaaaatcattagtagtattcaatttctactatatactgataattcaaccttgaacaaatggttataattctgcttctcatggcaactacattctaatgaaagaaagagatgaaaaatacacaataaatatatgcaaatataacctctcataaactctcatttaaatagtacttaggaaaaaaagggatattgaggaagataataccagagggtatggtgaggaaacctattttcaatgaggaaggcagggaggtgacatgatgggtgagaccgggaggcgagaaaggactaattgtaagggggaaagaaagagagcaaaaaagaaagaaagcaggaaaaaaagaaaaggagagaaagagaggaagaaggaaggaaggaagggagggaggaacgaaggggaaaggaaaggaaaggaaaggaaagaaaaggaaggaaattggtgtttttatctgaggaaaaatgtgagactagatttaggaaaacagcttggagtaaagaagaactaaaacaagaccagggtagccacagtgccgtaggaaaggcagaaagtgaccttggatgaagttggagccttggtaaatagccaggacataagagtcatgataaggccttgctataattgcaaaaatgttagagctgttaaatgttcagacgggacaaaaagtaatggattctttgttacgtttgtagaattctgtaatgataattgccttccaaactcgtaaaatcccgcctatcacaaacccatctccacttgatgtctcacttgaagccatccctatcatcagcttcataaaaatgcgaagatgcccattgtacacgctgtaagatgtacagtgcatttttttctaaccagtgctgttctctttagcaggaacaagatctttctgaggtgcaacactgtgagcacacacagttcaacagaattacttcagggcagtgaacccagtctacctctcagatctatgctgctatcctcctaattgtggtccatcatagccacaggccatgggttctagaatctgtttcctcactgtagtttaaattataatttccatatttatctcatttgttataactttcaaatcgatgatccactctccctttctcttatggataaattagccaacctattttacactctgttaattttaccctgtttttttttagatggagtcttgctctgtcaccaggctggagtgcagtggcacgatctcagctcactgcgacctcctcctcctgggttcaagtgaccctsctgcctcagcctcccaagtagccaggattacaggcacgcgccaccacacccagctaattttttgtattttagtagagatgcggtttcaccatgttggccaagatggtctggatctcctgaccttgtgatctgcccgccttggcctcccaaagtgctgggattacaggcgtgagccaccacgcccggtctgttttcatttttctaaatctcacttttgtaaagcccagtttattaaattatttccaagaacagtcagaaataattgtggttataaccagaaagttttaagtgaaattcatttctgaggaatacatacatttctcatgggggaactatgatgggttcattgacctttttgcaaaatttggcatttaaggaaataaattagagatttcaaacttttattaggaaaacagcaacagcaacagaacaactccaagcactatgaaatattacaattaataaaagttcaaacatccaagaattgtgtcatctttattttgttactattacaaacaattataaaacataatgtgttttaaaattctcttgcttgcttttattgtgtttatacttaataaccactggagctgggtaacctctcactagactatttctttctttcattttatgaggtcagattatagcatactaaaagatgaatgagctatctctaacttctactaatgaagacatttaatttttagagatattctccctcccccttttccttcaggtgtgctttgcttaaactatttttcaacataagataaacttttccaaaattttagttagggcaagtccagccaagttaattttatttcaggcatgcaattaatagtatatttttcaaaagtcctagtagcaataaattaaaaagaaacagtgaaaacagcatactgcagcccagtggtgtgcctgtcgtttgcacgcattgttcttgtctacccaacagtctatgggtatctctatagatggcttctaataaattatgtcacagattcttattccaaagacataaggagcgaaaaattttcacagtcaaatgaaaataaaaatcaaagctacatcagaaccccaagattgggaagatcagaattgttaactcactttctgagtatggtttccagcaggaagccagtgtgtacttcatgcctaggcatgagtatgagcaattatctcttggctggagtttgatgggcagaaatccaagtgtcatcactgtatgacactgagaatatagtgacatttggtggctgaatcaagcactacactgatctttgattcatggatttatcttgtgtcctgggatgagttaagaaatcagtgtgttccctctcgtttgttgaaatgagcagccaattctctgtgggtggtttcccattaggaagtggaaaactcactgttcaccagaaatgggcagctatcctaattttttatagggtaaattaacttggacaatatcattggggtgatacttctgcatggagtgagccaaaggcaatgacaatgttggatcaaaaaatatagatccaagtgcatttgagttaatgacctcacaatcacttagggataaccttcaaaaataggctcttcctgcagaaaaggtgcctaggagattttgtttgtatttcttttcaagtcacctttctgagtaaggttgtcatgtctcttcacctgctaaatgccctgaaagttcttccctacaaagaagatttgctagaagtcatttacatctatagtgaatgaaagtcactgttttcctagtaaatacatgcttgtagcaagaatgcaggacaatttttttttgcatacgtgagggcacagagcattgaaaagagggaacacaatgtaaaaagtaaacagtgactagtaataatgtgttgtttacttaagtttgggaagagaataaatcttaaatgacctcactacacacacaaacacacacacacatgcacagacatacacacagtgactgtgtggtgatggaagtgctaatcaatttgattgtgataatcattttacaatgtatacatatatcaaatactcacaatgtatatcacataattatgctgtacatgttgaatgtacagcataatgacaaataatttttatttgtcaactatacttcaataaagctgggaaaataaataaataaatgaaaaacttaaaaagaagggatggggttgagagcggaattaaaagggaatttagggaaagagaaataaactaattattttttgaacacaaagtaagagacaaatgtggtactaataactttcgcattcctaatgccatttcattccccaaccacggttagtatctgagatgaattctgagctacgacctgagatttttcttatcctaaattttcttgttgccctgagatccttcaccatttgcatcggtgacaggtacaggattagaggccctgtggagaatgtcaaggtagcaaacatgtcaatttgtatcttctgagcttcccagctcatctttgggattctgttgcacaggcagtaactttgagagaaaagatcttttgcgaatcaagactcacgttcatggtataaacaatacacttggaggaatatttacctaatcaggttttatccctaggacagtacaaaggaaaatcatttttagttccagagaacattagaattagttgctgagttggatctcattctgaaaaatgaagccataatcccacagccctgtgccaggctcaggcaggaagagggtagaataatgtgcaaatagatttatcatttaactggcagaggctgtcgttaattataataacattaggttgtccctcatttcactctgcataaaaacctcagtgttgttaacagatgactagttaattttttctgttatgcacttagtaattatggatataaatataagggaaacatagaatatttataatatttgtcatttgagaattctgaacccctttataaattaccattttcagatgtaaaataatacaccttaaaaagattaaaagtaactcacccaagacatattctctttttagaaacacctaacttaaaaaaaaaagaagcaaaacactttctaaataattgtatttgccctcatatcacacctgggaagtctttatcttctattttacagcaaagaaaaatgttctcgtctctattgttcttaaggtttacaagttttactcactcctatwatctaattttatcttcacaacatgtgcgtgttaagctaaacacgttaatatttccattttataaatgatgcagacacggctaagtttgttcacatgctcttctcaaaggctcacagctagcaattgtcagatttaaattcagactgagtctccatctctaagaccaacttattttattcaccaaatcataggacacagaaagttggtgtgacttgtccaagacacttggcagagcaggaataagaaaaaaatatctttagatttcatacttaagtgtgcctaacaatcattgtgtttttatgaaaaatgcaaattgctgagacttatccccagtacttcctacttggtaggtctggccggagcctaggaacttgcttatttagaagatccggttgtttctcatggtgatagactacaaatcccactctgaaagacaaaaggccctagcaccaaagtcatattttatgaagcagagaagcaaatttatcatagaccctaagtgacatgagtgccccatatagtttatttcataggaattttatttttgtaagagggatatatctttaagtataataatagatgaactatatataatataggtaattatacatttatattatatatatttgttgaaagcagatactctttttcattttagaaatattagttaacctggccaggtgtggtggctcatgcctgtaatctcaacactttgggaagctgaggagggcagattacttgagcttaggagttcaagtctaacctggccaacatggtgaaaccctgtctctactaaaaatacaaaaaattagctgggcgtggtggcatgcacctgtaatcccagctactcggcaggccgaggcaggagaacagcttgagcccgggaggcagacgttgcagtaagctgagatggcactgctgcactccagcctgggcaacagagcgagactctgtctcaaaaaaaaaaaaaaaaaattatccaccacattaaaggcaaggtggtagaaaagggcaaactaagcagtcttttctttttttttttttgaatttgcaaacaatctcccatggcttgtacataggctttccattttttactacaaaaacttgtaatctatctatctatctatctatctatctatctatctacctatctgtctaagtaatctatcgatctatgcctttgtatttattttgcggagacaatactgtatgagaccacaaaaaagctataggctttagatataaagctcaacttctaaggggaaggatctagatgtatc

SEQ ID NO: 94190 - DNA, 69867 bp, Homo sapiens
gttaaatatcctacaatgcagaggacagtccccacaacaaaaattagctgaccccaaatgtcaacagtgctagagttgagaaaaccgggtccagtttagtcaactttgaaatggatccttgggaacagcctggactagatgtcaagaaatcagtgagagaaaatcagagctggtatgaactgatgacttacaccttcattttttggggaaaagacttctcccaaaccattatacactctctaaaggcataaacaaggtttaaaaaaaagtgacactgtggttgtatttacgcattcgtcaggggcgtcttgcagaaaagcagtgtggtctactggaaagggccctagactagagcctccaaactatatacatgacctcggctctctgtgcctgtctgtaaaatgatggggcagtctgaccagtgggtgtccaagcttttagctctcagattccatattactataattcacttttcaaataatccacagcaaaacaaaaggactaaaattacttcttaacacaaaaagcagaccaggccagaggtgagaatcagattagaatccattcttccagcttccgcaactggtttctttgacctttacctcaggaatgtcagtgtcgtgctcgggagaatctccgccatcgtcacttgtcttcctcttccttttatttcggacactctggatgaaatttttgtgaaaatcacagatatataggtgccttacctgatggagacaaaaatcaaagtcagagttggccaattccttggagacagcaataggtatctgtcgaattgcggggcttccttccattgcagggcattggagagatagatggaagacaagatgtaggccatcattcccagaagctcactactgagttgcagaacacaaagagaatgctaacatcacacttggcagcgtatcatacaccaaacttccagtgaatggtgaagacagtaaatggtacagattcagcaaaggaagagatccctgcaacagagatgctcagggtgaagggccctgactaaaagggaggactttaggcagacaggaagcattccagatgggtaggagtgccaagactttagagtttccaatggaggatgacagaaagagtgaggaggcccagggtacagtgtcagttgggtgatgatggctgcccatgtaggagcataatgaaaaagtgaggcatcaggggggtgggcatgagaacagcttagactttccttccgacaagacagagtccctcaaggaagcaggaagtgatgtgacatttttagaagacctgtaggagtcataaacttatagtcgactggaatgtactgtcctggggaggaggaaagcaggacacaagggactgttgcaacggtatttgggacactctatttttacaattacaatagctactattgtaggataataactctttgaaaaactttgtttctatgtgtcaatttataattcttgcattatctcacatctgatccacaaagaaaagtggaaaaagatgtggaagttcttacaaggtagaaccacatacaagaaggtggatactacagattttctaatacaggctggaggcacactggtaagtgaaggtggcagcaacagctaagacatgaagaatcctccaaggctggctggaggaaccactgaaaaactttacagaaactgaatgcccagcaaatgacttggggttgttgatactgaaacagctgttgcacaaatgttctgcagagacttctgaatttgagtttattccttaaatccttaaagataaaagtaagctggcaggaaatccgcatcaattaattcagaccttttcatggagaaaataatgaaaactgtttatttatttattcagatgaatgatcactttcatgtggctggattagtgagtcataagtacttttaagtttatactgtgatggtgtcttgcagacaggaggtactcgaaaaatgttgatgtaccaatataggaagtctcctatatctaaaagtggcttaaggctaatgaaagccaccacttaacatggttacaaactgggatagctttgtcagattcaactctgtcaaaggactttcaaacacagcacatgccactgtcccaaagaatcccacctagctgatgtatatactactggacatgcttttctccaggaagaaagcacaacaaagcacactctgcatccctgagaggaagctagccctccatgttagctagactggcgagtccactcagatcaactgctcctcaagttcacagtaacaaacttcataggagaacagggagaataggtggcttcctaaagctttggctgggagatttcagatcaggacaatagaataacggaatcctagctgtaagagaacttagcaatcactagtgcaatcccattgaccccaatccgttttctaaatgggtaaaatgaagccatccagagtgaggaaatgacctggccaaggtcacccaggccttctgcccccccagtacatgtcttttcctactccagcattttcctttatactattctcaacttccacttttctccaggaaaaaaaaagcagaaatatgtcaactggaggtatattagtattttaacagatcacagaacactgccaaagtctatataaaatgagttaaacagcctgaattgaatttctggtgttgttatttaaaaaggttctctgctagactctcttacaagataaataatcattttctccttaaccattttcaagtacatactggttttcagaaatttcagagctcagtggcctttgggagtggggttggggcaggagggtggtagcaaaggctctagtttttttttttccttcactttctgcaatagctaaaaattcttgtaacataccagttacctggaattgaattcctgcccaagcctgtgagaaagaaatagaatccctttcagaaataatgactccacaacaccaccttaaaacaaattttgagtgattccacctggaaaccttactacctcagaagtattacattttgggaacactaatgctaggctcaggctgcccttcttctagacagtgtgtgtgaaatgatcagcatagctcaacacaggttttccagtacagtcaatgggtaaataaaaggagtcccagttgcagcagcaaaatcattcagatgggaaggcatccagtgatctaaaaggactggaagattcttttaaggactggaaattattattataagctgctcaagtaaagcagcttctaacaacctacacggaaggtaggcagtgtttctaagtggatgaattcattgccataagcatttcacctcaacgtgtgacctaaggagggatcaccttggtgtctagacccttgtttgttctcagatatttccattcatgcattcattgatagagatttgtagtaagaaagccattaactctctcccaaccacttaaaaatagcacctgtccatgcaagagctgcaactgtattataatgattaacttaaaaatgggggtaggagggaagagtctgaagaaaggacaggggctgggcgcagtggctcacgcctgtaatcccagaactttgggaggcctaggcgggtggatcatttgaggtcaggagttcaagaccagcctgtccaacatggcgaaaccctatctccattaaaaatacaaaaatcagccaggcatggcggcaaacgcctgtaatcccagctattcaggaggctgaggcaggagaatcgcttcaacccgggaggcggaggttgcagtgagtcgagatcttgccactgcactccagcctgggtgacagagtgagactccgtctcaaaaaaaaaaaaaaaaaaaaagaaaaagaaaaaaaaaagaaaagaaaaaggacaggggagattttttatttattagagacttaatgaagacttatgtatagggcttggaagtaaattagataatatctttaagaaattaaccagcctcttaggtgctgtgtgtacctgacaccctcacttcctatctctgggcctgtttcaaccctaaaatcagaggggaaacgtgcactccctttcagtttaacaagcagtctctgatttcctccaactgtggagaaattctgattctagaagagaatggatgttaaccacctaagctcttagctagtctacctgaatattaaatatccccttaactcatttccaattcctaatcatgaagcaatcacttaaggcttgtagcaacagatgtcaaactaaaaagttcttaattggttgacaataggcacagcttcagaattgttaactagaagtggtgaagtcacacgggaggagtttcctataataagccacaaagagcagggcaatccgatttaaatttaaatatccacccccttatttcaaaagaaactaccactaagaaaattgatttcttttcttcccccctccagtcacatcgactgcaagagccatttcccaagacctggccttggccttatttctgccacatcctagaaaaacccattcccacagctgcctgcgaagcagctagctcggtgaccctctgctgataccgaggatgcgggagccagggaagtaactgccacctttctctgtctgaaggaataacagggttcctagaaggagagagaagttggaaaagagccgggtatcttcatcactccccgctccgattcttgctccttcaagggccaacaaaactaacccacctctccctgctctaaagtctaaaccaataaaacaagttggaaactgctgtccaatctttccaggcagcaggagtcctgaagcccccgcccccatcctcccggatctgggtagaatcacagtcagagcatgtcagcgctggagcggcctttgaaatgcggagtccaactcagttctgcagagccggggcggcgaggcccacggcggggagtgcccggggagtcccgactggagcccagggcagcggacggagagctgggggcgccggggcccagacgcgagcgggggcggactcacgctcttgtcgatgtccagcttgagtttcttctgcgagatgctcttctggaccctcttgctgaaggaggcgttgcccgcgggccggacgcagcgctcgccgtcctcgatgaggcagcagctctggccgtagcccggggcggcggcagctggggcggcggggggcccttcgcggctgtcctcctccgtgctgaagccgttcatctccccgccccgggccggtccctctgggggagggtccccggtaggccactccgcggccgcgcttgccgcggggcaggtcgctgagacccccgcagccgagggtcccagagtccgtctccagcccgggcgctgccctgccccgcgtccgagaggcccggctccctcggcccccggccctccgcctccggaagcccccttcctcccggctcgaggccccggggtcggctcccgcggctcgcagggccccgccgggggtcacccggaggagccttctgccgggggcccagaaccgtaaccctgcagcgggggtgtccgggagggcgtcccaggaaacagccgctccccaaggactccgggcctgggttgccagggggtttcgaaggcccctgccggctcccgccttctttcggcagcggggcaaactcgctgccgggcagctcccccggggtggcgcggcctcctcgcgcggggcccggcctcgaacccgcggcacccgggccccgcggctcgtccggcccactccacccctgcagccactcggctgcgccccgagtcccgcggcagcccctgggccgcccggccgccgcccgccgaacgctccgcaccacaacagttcgctccccccgcccttcgcgggacagcggaagtcccgccttcacgcgaccattggtctcatttgctctctgggcggggctgccgccgccgctggcgcgtcccattgggcgtcgccgccgccagtctccggcgccaggctacttcctggactctgctgggatgggttcaaagtagagaaagtggaagaggaaagagttaccccagcgagaaccgggaaccgggctgcagactctccggcccgggggagggatggtgagcaggggcctggctggaccgagggccagactccaggaacagaggaacacattcggggacagacagtagagacgcggacggggacgctgagggacagacttggaggagsggcatatgaggggacctaaaraggatagaggtgctatcaggagaggggcggactaataaaatgaaagggccagggccagaggactcgcggatccgtgggaggaagggtgggtgaaataggacggaaagccagtcatggcgggaaagacagagggacaaccccatacagatacgtggaaagacatgcggaggaggtgatggggggatcttgcaaggcagtcgcaatattgggggtagccgataccttccagagtgtggagagtgggactggcttggacggcgcggaaagaaaaggagagggggaaaggagaccccgaggggtttgggcgacccctccactgggaagaatgggaagtccgaatgaggtctggagggtggactaggtgagccgcgggcaagagaaagggcttcaggggagatgaagtgaaggctgggagtggggcccaggggccaatctcggaatctagatggggaagggctgcggtgtcttgggctctccctggagctccaagctgtagttctattgctttgagtccccgggtctaccggcgaagcgactgcgccctgccaagaccctgcgcttggtttcggcgcccagggcaccacctcccctccaggaggggccgtaggatatgctctggtccagcacttcagtcatgccactctccaactgcgcagcatggggactgatgaggtccgaaaggcgatgggaccagcccagggtcgtgtaattatgtagggctgggcagcgttttatgggcagggaagaggggaggctgtgttaggtgataggtaagcaagtgttagtactagagggcatagaaggagcttcgggtttgtgtcctgttgtaaaagggaaagctaccagtttccatgtttagaagcaggtggctggtgatcttaagttttgctcagtggccataaatgcatttgtagcatctgaactggtaatttcacacgtgggacagccatmgtcggaaataggcctaycagagataatatgaagtacagtgatgttcattatggaattatttataataggaaaaataaaatagaacctcagagttccaaaagggaagtggttaagtaaactacctaaaatcttcagaaagagattgtgcagttagcatttgaggtagtttcaacatcaatgtaaacattttctatagagaataattcaccattaattcttaaataaagagctgatgaggagttggagaaatgctttttttatgataagtaaaaaaattcaggatatgaaattgcatggaggatacgatgtctgtacatctatgtttaaagaaaaaagaaaactattggtataaaaaatgcaccaaagtactaacagtgattatttctgggtagcaggaatatggctgatatttttctccttttgtttaacctttgcattttctttaataagcattatttttgtttttacagtagaaaaaatagaataaaaattaatggaaaaaaggcacagattaataggagtcttccctcagagttcatatattctgttcaaaagtaaattgttgttgaactcattatgtataccaagtatagggttggctataggaggaggatgaaacataacccttgccctaaaagaatatctcctatctggggtgttcagacatatatgtagaaaacacttgggtatctgtaccaggcactgtgtgatgttgggtccaaagtcagttggtatggatgaaacctccatgttycccatatttttctaaacagcatttgtattcaatgctaggctattgcggtacacaacttcttctgcaccaacttgccctggtctaaggggatctaggaccttttcttaggtgctctgtctcagtccttgaggtagtggctacttatatctgctattcttgtattatttagcattcttttttctttttactaggcagttccttataactgtaggggactacagtcccctattataattaatacatgtttatattattattttcctgttcaaattactgtaaggttactctttcctgattacacccagcctgatacgcccagccagcctctgtgtgtgtgtgtgtgtgtgtggtggtggtggtgggggagttcatgcttgtaactgttctttttttttsttttttcttttttyttttgagacagagtttcactctggttgcccaggctggagtgcaatggcgcgatctcggctcaccgcaacctctgcctcccggattcaagcgattctcctgcttcagcctcccgagtagctgggattacaggcatgtaccactgctcccggctaatcttgtatttttagtagagatggggtttctccatgttggtccggctggtctcggactcccaacctcaggtgatcygcccgcctcggcctcccaaagtgctgggattacaggtgtgagccaccgctcccagccattctttatgtataattttgtagtctttattcaaggcatactttatcataatctttccccatattgctatgtagttttcacagttgccattttttatgtagtacagtgcagtttctgtagtacagtacactgtggtgctaaagacagttggctttgctgtcagaactgggttcagatctggactccacccatgacttgttataacatgttagcaattatttcacttcttgrgtctgatgaaataggtggtgacaaattcttaacacagtgcctagaacatcataagtggttaataaatgtcagctatcatgattcctaccgtagttacatttgcccccccagaagttggatatcttttttgtgtggttctgtataattatttttgaacataaaactttttattatttaggattattattttttmtgagtgccagagatggaattgtggtcaaagactacaaagttttccaaggtctaagggccaggctcactgaccctttttttctttcctgtcttttctgcccctgccctccccaccttcattccttccatccagtcaggccccagttgagaagttatcccccaacacgccttaaagaatcagagttggataccttggccaagcagtcacagtcctacaaaagctctttgctctcctctttctctcctcttttccctttttggggaatgtggcatatggctctgggagtgatttccaatgactgcccttctttgggaacaggtggacacttaggtgtccagtgactgggtttctaatccttgagtggcccctgattgtctaatagtgaatacttgctgggttaagcctgtggctcaaactgtactggtcagtttctctccagcaaatctgctggttggaactgacaggtggttggtgggagtggttagagcagaggcactaatggtgggtcctgcctcctgtgttccccagggcctggtagttgagcttgcccttgggttctgtaaggtactcatagatatgttggcatgaaccaaaagtatctgagacaggtctcaatttagaaggtttatattgccaaggctaaggacgtgcacgtgacacagcctcaggaggtcctgactacatgtgcccaaggtggttgggatacagcttgcttttatacattttagggagacatgagacatcagtcaatatgtacaagatgtacattggttccatctggaaaggcaggacaacttgatgctggggcttccaggtcatagatagataagagacaaatggttgcattcttttgagtctttgctcagcgtttcactgaatatacaatttacatgtggggaaggggtgaggtgggtggtagaggaatagtcatttatgcctttgtctcagtggatctgcatttttacataaacaacagggcagaagaagcaatcagatattcatttgtctcaggtgagcagagggatgactttgagttctgtcctttgtcccacacctatgaagataagctatccatttacattgccagggtgaaattcaacagaactgttttagggtaaagatcttgatgcccacaaggaatttccttgtgggcaaattgtgagggaggtctgtagcttttttatctttgtagctatctaacttaggaataaaataagaggtaggtttgcctgatgcagtttccagcttgactcttccctttgccttagtgattttggtgtcccgagattcattttcctttcacattgttctgagactggaagttctgcaaggacagggaactgtctctatggctcatcatagtttccagtgcccaggcacttgattaatatttgttgaatggatggatagatggatgatggatgacttggcctctggaatcaagaggcagtacagcataatggttggtataaatctagatgtagtcagcttatgctggaatcctggctctgccactgactagcctgggaaccttgggaaaattacatggccttagtctgccatggtttcctcatctgtaaaatggggatgatagtaacctctcgggattgttgtgaagactgtctgagttattagatataaaccaactattagatataaaagtgccttgcacatattaggtactcaataaatattagatactattattggcttaattagtcataattaggtttagcaagtaacagaaaacccaaaaataagcttacatttttctctcaccttcaggaatcctagaggtgatcagattgttttcctcagcatcagagaccgaggcttctcttgttgctttgccatgtttggcttccattcccaaggtcgcgtcactaagcaaggtggctgctgggactcccatctactgaggcattctagccaggaggaagggggaaaggcagaggaagggctcacccttgctctttaaggatagttcccagaagttgtaggtgagcctcccacttgtacctctttggccagaatttcgccatacctaacgggggaggggaacattgggaaatgtagcccttattcctggtggctgtatgctcaggtgaaaacagagggctctgctacacgtggagatgggtggaatgtatatggagcccaaccagctgctctgctatacctctttttagaatttccccatctcttaaattctgggagtgtgtcttggttaattttggttctgtttctctggagaacactgactaatctgggctgcaaagacctgtagttttttgatccagggaccactgcagcctcagcattttgccatttctcaagtttctgaatttttttttttttttttgagacggagtctcactccgttgccaaggctggaatggggtggcgcagtcttggctcactgcaacctccatttcctgggttcaaacgattctcctgccacagccttctgagtagctgggattacaggcacccgccaccacgcctggctaatttttgtatttttagtagagatgggtttcaccatgttgtccaggctggtctcgaactcctggccttaagtgatccactcaccttggcctcccaaagtgctgggattacargtgtgagccaccgcactggctgtttctgaatcttaacaatgttctctgcagcttgcattgcaagaactggtactgactccaacagagtatcacccagtctttaaaggaaagatttacaggtttcaaacctagctctacatcacaatcacatagggaactgtaaaaaaaattacaaaaatctcaggcctcatctcagacctcctaaataaaatcttggtggaaagagtatgaggctctgaaatctacattttaatacacattaatttaatctatggatgattcttaatgcaccttaaagtttaagacaccctgctttaaaggttaaagtatgtaataaatcttcattggaggcaattacctcttctagtctagcctactcactttctttcaaacatatgtattttcttatatctactcttttgcttacagtgatccctgacttagactcactggctgtgagacttagaaagggtcttaggaagccaatcctttatttaagcctatcggatttgagttcagcaaggttgagcaacaagtccaagcacacacagtgattagtggctattaggattgagaaggtatatggtgacagcatttgctgggattatctttaaaatctccttccccccaaattaagaggttatacacaataaggggttatacacaatttattttgccaagttagggcagttccctctatagcctctacatgctccaccccatgtctaggtattggccttcagggctgggtacacttgcattctctccatatcctttccctagctgatactaggtttccttacaaccaccatatgctaatgtctcccgtcaataaatatctgaagacttgtgtgcaaaacgacagatttgaaagtgaaatagattggttgccattagcaatatttgggaaaaattctggtctctttattgggggagtaaatctgtaactccagaaaggaaatgggaataaatattctgtagtgaagaaatgaatacagaacagaagcttctatgatccttgttctgctttgtgtaggatttaaggttcttgaaatagccaagtgaatctgatttgctacatttatacatttaggtaattaatttacaacagttgcttaaatgcttagaaaggttttgctttttagatttgtaagtctgccctattgggcatttaaagtgagaaaatcaggcatattaaattgataattgtagttttaagtgtctaaggaaatttgattaaggaggtaagtcttattaaatattaaggaggattgaatatactaaacttaagaattaacagtaatcaaagaacaagtgaaagtgattgttcttatctttacacaagaaattgctagatttaaaatggaataacaagattttgttcttatctttatacaagaaattactagatttaaaatggaataacaagatttgtaaattgaacttaaagtttaagaaaggctaggtttttaaatggacaacttgagtcagtgactgtaagattcctgtccatacccaaacctacccccagatatttaaaggcacaggtcaataactcccagttttatagttccagctgagacctctcctttgaactccagacagcaacacttcagctccttgcttgaggtgctccagaggcatcacagaccaagatgttcaagttgaaacattctctgactccgaatccagactccataaactgtgccacctgtacctcctttaactgcctctcaccacatcctgaggccactcatcattgaggccattttctttctttctttctttctttttttcatatttttgagatggagtctcgctttgttgccaggctggagtgcagtgacgcgatctcagctcactgcaacctccgcctcacgggttcaagcgagtctcctgcctcagcctcccgagtagctggaatcacaggcgcgtgccaccacacccacctaatgtttgcatttttagtaaagacggggtttcaccatgttggccaggatggtctcgatctcttgacttcgtgatctgcccacctcggcctcccaaagtgctgagattacaggtgtgagccaccacgcccggccgaggccattttcttctacctccaatagatacatttagaatctgtctcttttacttcatttcccacagctaacagtccattccaggccaccatcacaccatcatcttttgcctgaagtgcataagcctccaacttggtccctaaacttctctacccagtgagctctacacaaaccagaccatgctccctccccattaaggcccctcacagcttcccagtgcattctgacagtgctctctgcacctcttcgccctgtcccacaatgcatgagctctcttattcttttttttatgagacagggtctcactctgttgcccagcccagattgtagtggtgcaatcatagctcacaacagccttgacatcctgggctcaagcgatacccccatctcagcctcctgagtagctgggactacaggcatgcgctaccacgcttggctaattttttgtattgtttggagagaggggtttccctgtgttgcccaggctggtcttaaactcctgggctcaagtgatccacccacctcaggctcccaaagtgctgggattagaagtgtgattcatgcctggcgttttgttttgttttgttttgttttttttgagacaggatctcactctgttacccaggctggagtgcagcactatgattatagctcactgcagcctccaactcctgggctcaagtgatcctcctgtagctgtagtctcccaagtagctgggactacaggcacatgctaccatgcccagctaatttttaattttttttttatagagataggggtgtgcctgtgttgcctaggctggtctcaaaaaattcctgggctcaagcagttctcccacctcaccctcccaaagtgctgggattataggtgtgaaccacggcactgggcctgccttattcttccttaaatttctcaagtaagccatcctttttcctacctcaaagtcttgcatttgcagtttccttggcctggaatgctgtttccttcctactggcttcattcttcaaatctcaacttaaatgtcacctccacagagaaccttatctgattaaaaggagttggatcccccacgaccaccactattctctatccaatgtcttttcttattagcatttatcataatatgcaattattctgtttgttttgttgttcctcaagtgtttcttctattagaatgtaagctccctgaaggcaaaaaccacatctatcttgttcctgtagttccaatgcatagaacacaaattctccgattctggtggctaatagagtagggactcagtaaacattttaaaaataaaataaatgtactcaactataccaaaagatttattaagcaaaaaaggtaagatacaaaacagtatgtagtgtggaattccatttatattttgtaaaaattttgtgcagacacacacacacacgtgcatgcacattaaggatacacaaaaaactastaactgtggttgcccctaggatagggactatgactcaagggagagaagatagaagtaattttaattttataatcattgttcctatttggatttttgttttactacatgtstatatttcttttataataataaaaataccatctagtactgttattttaaaaaggaaatatggaatagcaaaaaaaaaaaaaaaaaggaagaatcttagaataacagtcatttaaatggaacaaatttgtccttatgaaaaccccacaacattgtcctttttttttgcattccactgaggacctgggaaagcttcctccagccctgatgctggcctgcagtatggcacttgacagctactggtattgtggatagaagcaaaggctctggactcagcaacacttggtttgaattccagttctaccacttactagctgtggtgctgctgacaacttaaactccatgaacctcagttttcttcatctgtaaggtgggataacagtacttctctaatagggatattgtgaggatcaaatatgatgatctaaagcagttagcacaatatcttgcacatagtaagtgcttaataagtggcagttattatttcatacattataaggtgatacccctgaacttccattgtatccagattcagatttctgcatgttaaaggacacatcatattgcaagacgatagggtggtactgcctatcagccaattgtgtaggctccagatccatcagcacagcaatgattgggaaagtacttgattattccatgttatcctcattttataaaattttgtcagtggaaaatggaagtaccaatagtagtgataagaagtatgcatctgtcaagtaagtgaaaatacaacccactgaatgggagaaaatrtttgcaaatcatatataaggcagtggtccacaacctttttggtaccagggaccggttttgtggaagacaatttttccacggttgggggtggggagggggttgggggtgagtggggatgatttcaggatgaaactgctccatctcagatcatcaggcattagattctcacaaggagcacccaacctagatccctcccawgtgcagttcccagtggggttcacactcctgtgaaaatctaatgctgccgargatttgactggaggcagagctcaggtgctaatgctcccttgcctgctgctcacctcctgctgtayggccccattcccaaccagtacctctccatgcaggtgtggggaggcaatgcggtgtggggaggcaatgcggtgtgggggtgttgggaactgctatgataaggaacttgtattcagaatatatgcagaactcttattactcaataataaagagacraataacccaattgaaaagtgggctaagggtttgaatagacatttctccaaagaagataaacaaatggccaataagcccatgcaaagatgctcaacatcctaatcaccagggatatcagaagggaaatgcaaatcaaacctgcaattaggtattacttcacacctactaggatggctgtagccaataagacagacaataacaagtgttgacaaggatgtggagaaattgaaacctacatatattgctggtaggaatgcaaaatggtaaaacactttgcaaaacagtgtatcaattcctcaaaaaaaatttttttttttttgagacggagtctcttgtcactgaggctggaatgcagtggcatgatatcagctcactgcaacatccacctcgtgggttcaagtgattctcctgcctcagcctcccaagtagctgggattacaggcacctgccatcatgcccggctaatttttgtatttttagtacagacggggtttcaccatgttggccaggctgatcttgatcctgacctcaggtgatccacccacctcggcctcctaaagtgttgggattacaggcatgagccacctcacccagcccaattcctcaaaattttaaaatagagttactttattaatcagcaatttcactcttaggtatctgcccaagagaaatgaaacaattcatccacacaaacacttttacatgaatgttaacagcagcattattcacaatagccaaaaggtggaaacagctcaaatatccatcarctgatgaaaggataaacaaaatgtggtatattcacacaatgaaatattaatgatacaaaggaagtgctgacacatgctgcaacatagatgaactttgaaaatatgctaaatgaaagcagttacaaaagaccacataatgcatgatttgatttatgtaaatgtccagaaagggcaaatccatagatacactatagaaaatagattagtcgttgtcagaggctaaagagagtagggaggattgggatggggagtgacttatgggtacagggtttcttttagggggacaaagatattttggaattagtagtgatggttgcacaacctagtaaatatactaaaatatatgaaattgtacattttcaatgggtgaattatgtagtatacgtgatttatatctcaacaaaaaggagtttaaaaagaagtatgtgtatcattgactctttcgatataaacatagaaatcattagacttatcgaaagggatgaatctttagcctccatgggatgttcttaagcctattgctgttttttgatttgtgaaggaaaataatcaaattgaaggtacattaggaaggacagcaaacatatgatcagcgattgtgtctaaaaatgcaggtgtaattggacatgctgtaccactttttattcccaacataaatttgttgtttgacttttgtacttttgacattagtaatattttctgaaataaattgtgtatggaagcaggggactgtgtttactgtgtcatggggaaggcaaatgatctctcagccctcttcacttcccatttgtttaatgctgaaccatcaagcaaacttcctctagggaataattcagctggtaccaggagactgcacataattatttgggccactggaaaattctaatgcccatgaaaaaatagcttttggtttatagatcagtcttttgtgaatttgggcaggaaaagtcagccctggaaagtggttttattttgaccataactaaatatgcaaaaaatagtaggataaataatgagattattaataaatctcacaaaactgtaattctaaggtttagctttagtttggttggttcatcaacagctcaacaattttggaggtccaaatctgttctggtaagagctggggataaaatggtggatgatatagacacagccttgcttgcccaaagtcaagtggaaaagtaacataacataagagtgaataacataattatgcattattcatagattccattattatactcattcacagattccagatttacaatttacctactctctaaaatgtatttgtaatctcaaaaatcaatgctcttggccgggtgcagtggctcacgcctgtaatcccagcactttgggaggccgaggtgggtggatcacctgaagtcaggagttcaagaccagcctaaccaacatggtgaaacccactctctactaaaagtacaaaaattagctgggcatggtggcgggcaactgtaatcccagctactcgggaggctgaggcaggagaatcacttgaacccgggaggtggaggctgcagtgagccgagatcgcaccactgcactccagccagggtgacagagcaagatcctgtctcaaaaaaaaaaaaaaatcaatgctcattgcacttaaaaaaaattcgtatgttttgagactggtcttactctgtcacccaggctagtgtgcaatggcacaatcatagctcactgcagtcttgacctcctgggctcaggcaatcctcttgcctcagccttcctagtagctgggactacaggcatgttccaccatatctgccttttttttgttttttgtagagatggggtcttgctatgttgctaatactggtcttaaactcctggacttaaatgatcctcctacttcagcctcccaaaacactgggattacaggcattagccgccgcaccctgctatatggcacttttgagattacttgagratgtgcatatgcacagagtggtgaagaaaattcgagttgtccagcaggcgctgtcacagactgaatgtctgtgtcccttcctgaattcatttgttgacatccaaacccccaaatgggagatagggcctttggtacgtgattaattcatgaggatggagccctaatgaatgggattagtgcccttataaaaagacactgcagagctccctcttcttttccactgtatgaggacatagtgaaaacatggtagtctatgaaccaggaagtgggctcttactagatactgactctgctggcaccttgatcttggacttcccagcttccaggactgtgagaaataaatttctgttgtcaaccaggttaagttattttgttataccagcctgtagacacacacgttcacagctaaggtcgaaccagaggacatctgccttcttgtttcagctctcatactgtaaacaagtgtcctttggtggtttattgagtgccacatttttcatatttttaagctttttgttggtgattttggtttacatggtgcccaagcatagggctgaagtgctgtctagtgttcctgagcacaagaagactgtgatgtgccttacagggaaaatatatgtattggagaacctttgcttgaggcatgagtcatagtgctattggctgtgagttcaatttaatgaatcaatgataaatattaactaaggtctctctaaacataaatgcatataaaacaagattatgtattgatcacttgattaaaatgttgtgatcagaggcttgcaggaacgtacccctgtacttcccctagggacaatagttcagtattcactaactgtgttcatggtgacttacagaacataactaccatgaaccatgacaatcgactgtaagtcaggatacatgccatgcgaggagctacagaggtgctggaatgattaagaatgatgatggggggatgtctattcttaatagggtggtcaaggaagcctcttgggggaggtgacagtaaagctgaaacctaaaggatgaagctgcagagcaggggggaagagtattccaagctgagggaacagggtccgaaggtgagagagctttggactctgtggggaactggggtcctgccaggaggtgatggaaaagtaggcagggatcagtcccaacaggccttttgggccaggctagggagtttgggtttattgtaaaggcctggagtaaagttacctgtaggcagtggtaatcaagttattctcttttaatttgtgtgggaactcaaatctgttctcatcactaggccatagaagttgcagatcatcccttatgcacctggtatttgcagggcctaggacagagctgggaccaatcactgtgggtacaaaatgcgaaacaccatgagcccagggtacctatttcaatccgtgtttgttgattaaatgaccaagccctgggattctgtggctgcagctgtgaagaaatcatagcagagattttttccccagatcccagagaaacgcagaattcaggcctctgcttcccaggctgactgacaggccagtggtgtggtgtgggggcttagctctgggctctcataaaggcagacctgccatcctcttcctcctaccctcaggcggaagctggcaggagatcagacgatacttggattccaaggagttcatgaacaaaggctgtaaagttgctaagaaactgcctttctgggggttcaccattttttttttttgttcccgtggtgttgtgtgtgagtgagtgtgagtgtgagcacacccagggctgtcactctgccaggcctgagtgaagtcacactcgaagggaagaactgcaggctgccgtgcaggtgcagcaccaccatggaccccaggtrtccctaagctgggcagaccaggctttgaggataacaaaagtggaaccagctgcccgaggccagaggttggcagagctgtgtgcagctgcagcagggaagccttggatgttgagtgttggacccacttacagcaaaaaccaagaagccctgggttgggagataccaataacagaactgggagggagtcccacccctacctcccagctgagcttggaaagtaaattcttaacaaaaccaggtcattgcaaaatacaagatgcaagatttatagaactctaagagtccaggctgaccattatctaacttgcctccttctccttattctcatgtggagaatccaaagcctagggaggggaaggaactctcttaatgggatgtagcatatatcaagtgcaggaacccggcctatcagaagggctgtgggctgtgartggagggaaaaaaggcctggtgtgtacctgaaaatatagtactcatccatttgtccactcatcaagtacttattgagcttctactaagttccaggatcccctamgccccagttccaaccaaacagagaaaagtagagcccaaaactttgagcaaattgctggcttytctgactgtttcccaataagtgtgccactgccaaccaccaccaccaccaccaccaccacaacaacaacaacaaagctcacactctgtgtctagctcagcatcttagatacattggattctactctcgcttgcaggcttggaaggagaaggagctaaaatgggtgagaaatgtaatacctactcccattcttccaccagctcaaggaaaggatcttgcccctaagtggtcagtgtctttgaggaggcaccagaggtccacttgccctggcttgtttctcactgtgtttgccctgggtgcccattatgtgctaagcagtggagtaagtcacttcctggctccagacatcagtcaagggcatatctgataatctcactgtgcccagttttaaaccctttaatggtttctattactcttaaaataaagatcagagtctccttaatgtgccccacaagggcctatggtgctggcttttgcctaccctctccctgttctcctctttccttcctgttctctgctccagcctgcctgcctttcatgcccgccatactccctccatggggtctttgcacatgttggcccctgcacctggaatactctcccccttttgtttctttttttctttttttctaataaaagaatttaatctttttcaggaaatgattaagcattttggaagtaaatataggtgaaagtctatcttattcattggtggaaaaatattttttaaacaaaacaaagttacaaaagaaaatatcaatacatttggccacataaaatttgtccaaataaacttaaaaaatgcaaatataggamagagctttaacatcgacatataataaaacattcttgtgtattgaccataaaggaactaaaacttttaaaaatatatattaaaagatataggccagacycacgcctgtaatcccagcactttgggaggctgagttgggcagatcacttgaggtcagaccagcctggccaaaatggtggaaccttgtctctactaaaaatacaaaaattagccaggtgtggtggcacatgcctataatcccagctactcaggaggctgaggcacgagaatcgcttgaacccaggaggcggaggttgcagtgagccaagattgtgtcactgcactccagcctgggtgacagagcgagactctgtctccacccccacaaaaataaaattcacataccataaagttcaccattttaaagcgtacaattcagtggtttttagtatatttacaaagttgtgcaaccatcaccacttcttttttaattaatttatttgtctaaatttatggagtrcaagtgtcattttgttacaaacatagatagattacatagtggtaaagtcaggtcttttagtgtatccatcactggagtaatatacattttgcccattaggtaatttctcatccttcaccccctcccaactcccacccaatggagaccttctgagttttcatcgactattacttcacacatattaatgtgtaataatgtacatattatttagctcccacttataagtgagaacatgcaacatttgtctttctctgtctgattcgtttattttgagttaatggcctctagctccatccatgttgttgcaaaatacattatttcattccttttcatggctgaatagtattccattgtgtgtgtgggtgcatgtgtgcatgtatatatatacacatatacacacacaatggaatactagtatatgtgtgtgtgtatatatacacacacatgtatacgcacatacatgtatatatatatgtatatacaaacacacacagggtagatactgttttacataaaggttatgctaattaacattcccaccaacagtgtataagaatttccttttctccatatcctagccaacatctgttatttttttgtcttttcagtaacagccattccgattggtgtaagatgatatttcactgtggttttaatttgcatttctgtgatgattggtgatgttgaactttcttcatattcttgttggccatttgcttttctttttttgaaaaatgactattcatatccttagcccactttttgatgagattgtctgtttggttgttgagtagtttgagttccttgaaaattctggatattagtcccctgttgggtgtatagtttgcaaatattttctcccattctgcaggttgtctgttcactcttttgctatgcagaggtttttttctgttttttttttttttttttttgagatggagtctcgctctgttgtccagcctggagtgtagtggcgtgattttggctcactgcaacctctgcccctcgggttcaagcgattctccttcctcagcctcccgagtagctgggattacatgcgcctgccaccacacccggctaatttttgtatttttagtagagatggggtttcaccatcttggccaggctggtcttgaactcctgacctcgtgatccacccgccttggcctcccaaagtgctgagattacaggcatgagccactgcgcctggcctgctatgcagaacttttaaaagtcccatttgtctatttttgtttttgttgcctgtgcttttgaggtcttagtcatgaattctttgcctagatcaatgtctagaagagtttcccctagtttttcttgtagtatttttatagtttcatgtactacattcaagtctttaatctattttgaattgatttttacatggtgagagataagggtccagtttcattcttccgcatatggcaatccaattttctcagcaccatttgttgaaaagggtgtccgttctgcagtgtatatttttgttgactttgtcaaagatcagttggctgtagatatgtgtgttcaaatctttgcttggcttattcatcttttgattgttgtattgccagagatccctttatatattttggataccagacgcttgtcaaatataatctgaaaatattttctcattctgtgagtttttttctgttttctttttatttcttttcttttccttcttttttctttttttttttcaaggcagagcctcgctctgtcacccaggctggagtgagatggcatgatcttggctcacggcaacctccgcctcttgggttcaagtgatgctcctgcctcagcctcccaagtagctgggattacaggtgtgcaccaccactcctgactaatttttgtatttttagtagagacggggtttcaccatgttggtcaggatgttcttgaactcctgacttgaagtgatctgcccacctcagactcccaaagtgctgggattataggtgggagccaccgmacctggcctcttttcactttcttaatagtgtacattgaggcacaatagtttttaatttgattttaatttaattttaaaatttaatttgaaatttaataattaattttaaaacttaatttaaaatttactaattaattttaaggctaggtgcagtggctcatggctgtaatcccagcactttgggaggctgaggtgggcagatcatgaggtcaggggatcaagaccatcctggctaacatggtgaagccccatctctactaaaaacacaaaaactaaccgggtgttgtggcacacacctgtagtcccagctactcgggaggctgaggcaggggaattgcttgaacccgggaggtggaggctgcagtgagctgagaccatgccactgcactccagcctgggcgacagagcgagactccgtctcaaaaaaacaaaacaaaacaaaacaaaacaaaacaaaacaaaaaaacccaacttaatttaaaatttaataagtaattttaaaatttaattttaaatsaatgaagtccaatttatttattctttagttgattgtgtttttaatatattttaggaaacgattgtccaatttaaggtcacaaagattaacatttattctttattctataaattttttagttttcactcttacatttaagtcttttatccattttaaggtaatttttgtatgtagtgtgaggtaaaggtacaaatccattmttttgtatgtggatatacaattgtcctagtgccattttttttttttttgagatggagtctcactctgttgcccagactggagtgcagtggcatgatcttggctcaccgcaacctccacctcccaggtccaagtgattctcctgcctcagcatcccaagtagctgggagtacaggtgcccgccaccatgcctggctaatttttgtatttttagtagagatggggtttcaccatgttagccagactggtctccaactcctgacctcaggtgagctgcctgcctcggcctcccaaagtgctggattacttacaggtgtgagccacagcacctggtcttccctagtgccatttttygaaaagactgttctctctccgttggatgattttgattccgttgtcaaaaagcaatagactgtaaatgtatgagttctggactctcagttctgttccattgatctatatgtctatccttatgtgtgtctgcattactgtatctttgtagaaaatttaggaattgaaacgtgtaagtcctccagctttgttattctttttgaagatttttgtgactgttctggatcatttacatttccatataaattctaggattaacttgtccatttctacaaaaaaggcattgaagtggtttttttttttttgagatggagttttgttctggttcccaggatggagtgcagtggtacgatctcagctcactgcaacctctgcctcctgggttcaagtgattctcctgcctcagcctccccagtagctgggattacaggcatgcgctgccgcgcccagctgatttttgtatttttagtagaggtggggtttcaccatgttgcccaggctggtcttgaactcctgacctcaggtgagccacccgtcttgggctcccaaagtgctggaattacaggcgtgagccccyrygcccagctaccactgaaaattttgatgaagactgcattgaatctgtagatcagcttggcaagtactgtgatcttaatattgttttctgattcrtgagcagggaatgtcactttcttaggtcttctttaatatccttcaacaatgttttgtagtcgtcagtcttgcacttatttggctaaatttatttctaagtattttattctcccctattgctgttataaatgaattttcctttttgttttgtttttttttgagacagggtttcactttgtcacccaggctggagtgcagtggtgtgatcttgacacactgcagcctcaaactcctgggctcaaggtatcctcccacttcatcctccctagtagctgagactacagatgtgcaccatcatacctggctaagttttaatttttttttgtagagacagggtctcacgatgttgtccatgctcgttttgaactgggctcaagtgatctacctgccttagcctcctaatgtgctgggattacaggcgtgagccaccgtgcccagtcataaatggattttcttaatttaatttttgtttattgtcagtgtgtagaaatacaacttgctttttctyggtcagtctagctgaaagtttgctcatttttgtagacaacccttttcaaggaaccaactctcggtttcattgattttttttctatttgtctaatctctttaattgatttctgctctaatctttatcattgccttctgtttgctttgggtttcatttgctcttctttttctagtttcttaaggtggaagattggattattaacttaagtttttcttctttttaagtgtaggcatttatagccataaatttccctctgagcactgatttttctacatcccataaattttgatatgtcatgtttttattttcgtttgtctcaaataattttctaattttcctggaaattcttttttgacccattggtcattaagagtgtttgtttaatttccatatattttgaatttccctaaattttccattactgatttctaattatattctgttgtagctgaagaacctattttatgttatttcagtcttttacaatttattgagtcttgttttcttacctgacatataatctattctggagaatgtttgatgtgcacttgaactctgttgttgctctgttcctttcctcctttttttgttgttatggtattgtgctgttgatgggtggagtgttctatagatgttagttctagttggtttacagtattgtttaagttttatatttccttattgatctcatgtctacttgttccattcattattaaaagtggggtactgtagtctgcagctattcttgtcaaagaattatttcttctttcaattctgtcagtttttgcttcatgtgttttggggctctgttattaggtgcacatatatttttagttgttacatcttctatcttcttcttgaccttttatcattataaaatgtccttctttacctctagcaaaaatttttgtcttaaagtctgttctgcctgccattataaccactgcagctctttgttggttactgtttgtgtggaatatctttttccacacgatcttttaaatcttttacattttcaatttatttgtgtctttgtatctaaagtgtgtctcttgtagacagcttatagttgggccatgtttgaatgcattctgtcaatctatgcctttttataaggagagttgaatctatttacatttaatgtaattaccaataaggaacgacttaacttctgccattttgctatttgttttttatgtcttatatcttttttgttcaattcctccattactactttcttttgtgttattttctagtgtaccattttgattcccttctctttttaaaaactatgtatttttgagttattttcttagttgttgccttgggggttaaaattaacatcttaattaaaaaattctgattcaggttatagtatatggcaactttgctcttatatagctctgtccctttcttcctcccctttctcgttagttattgacatataaattacatccttacacattgtgtgcccatcaatagatttatgattatttaattatgcagtttgcttttaaatcagctaggagaaaaaataagttttaaaaaaaaccctatctatactgtcttctatatttacctatatagttattttgaccagtgctttttatttctttatgtgaatttgaattactgggtttacccaatgggaggcagtgagtggcagatgactggaaggtagaaaaggaggaaggacaggatatgtattcctcccmtctcctcttgttttggcagtagctgcaatttactacctgcagctgcagatcccattgggaagcccctgttcctggctacagccttctctgcattatagtaacactactgcttcttgccttttcaggcttacaagtagtaacagcttcccatttctgctagtccttaggtgcttcaccatcctttgttgtttccttaatcccacccatacttctgcaatagttccttcattaaattctcttctgttactccaggagtgggctatatcatgacaagatcttagccgactcagcatgctccatgaccttcttgctaaggtcaagttcttatactctcacgtgtacttctcctttgcagagcttaccacagtccctaactatacayttattttaatgatcatttgtttaatgtctatttttctaactagatcataagtgccttgcacagtcttttaatttctagcacagtgcctggtatatagtaggcatttgatgcatttttactgaatgatagctaatatttttctcttatctgtttcatggaattcttctgagagtctggggggtacaacaggtataaaaggctttaaaaattgaatctctccccatgtctacaaagctgtaaggtgttattgtgtgaggataacatgagcatgggcatactgaaaacctggatggactgtgtcagtcaccaccatgtcatcttgggtcagaatttcccctttgtgttattcagcctttgtcaagccatggtccatagcaccctctggtggtccctgagtgacagcatgagggggcagcttccagcttctgttcattgtcacccgtagcccccaaccaagactcaatcataggaccacaggtggagctggaagcatcatccaaaaacttgtcattttactgtggaaaacaggcctagttggaagcagcatttgcacaagatctcactgagtttttttgtagagctgggccagacagtgctcttcctaccatatctaatacctgatagcatgaaaatgttttggtaagcaagtactcatgcctgttgggtaagcatcagaaatgagttacagctgggtgtggtggctcatgcctgtaatttcagcactttgggaggctgaggcaggaggactgtttgaggccaggaggtcaagaacaatctgggtaacatagcaagactccatctctacaaaaaataaaaaaaattagatgggcatggtggtgtgtgtctgtggtaccagctactagggaggctgaagtgggaggatcacttgagcccacaagttgaaggctgcagtaaactatgagtgccactgcactccagcctgggtgacagagggagaccccatcaaaaaaaaaagttatgcttatttcatattgtcactgccctcctgagatcctccgctcctgggtgtgaccctttgtgggctgccccacgtaactcttcaagctaacctccttctgctcctccaacacagaaacttctacttacctcagggcctttgcactagctgttccctctgcctggaactctgttccgggaaatcatcttggttcaccctccttcatgtctttcagctctcaccattctagctaacgttgacccccactccagtctctaatatatcattgctttatacccttcatagccctatttgcatctgaaatcatcttagttgttttaggtctgcctttcactctagaatgatggctgttgggagtttttagtacccagcagaatgcctgagtccgaagtaggtggtctaygtgaagaatgatgaaaagaagaatgacacatgagaaggaagaaggcagagaccactttagagaaagtctggaggtttactcaacaaygttcacaatcacaattgtacatggtaaatcwgtctttcacaaaggcttatttttccaggcaggaggagaggctggtggtcttgagcttttggcctggaattccagtctgaattttcaaatattccctgcctccaacccctttgggatcctagtcttcaagccaataacagagcaggagtctgaccctgttctkttgcctggcacggctgaatcaaagccattctggaagcagatgttaaggtgaacttgtcacttggtatgtaggtccgactcccatcccagaggtggcagtgggccttggctcaagatcamgtttgaactaaaatattacttggatttttcacaaagagtgtccgttgaaagcaataaggaattccagaacagaactgcacttcttgtccctctctcacacttacaaagcttcagaaaacattaaaaatgcattacctcctaggaattacaaaagatcacccaactgtacaaactagatatcgctgaagcagagactctgattcctcagttactactgtaaagtgctttgccactctttttgagactccagagactaggaaaatggagatgcacagagagacataaggagctgttttccaagacatcacctgtttcttaaggaaaaaaagaaattcaactggtgggaagtttgaaaagtgaatgtcatgtagactttggaaatccatttgttacatctttaacagaaactgctctttctctcctggaccgaatgtcacatcctctcgtccgattcctcctgtggatgtaccccgttctgcctgagcattttttcctaaagggaagaatcaatagtttctgactgttttaacagctgaaagctccaactggaggcagaagatgggatggcttttcacacacgtgcgtgcaagtttagccacctccaaaggccttgttcttaaagcaacagtgctgtttgcattatgaaatgtctctggagttcccctttggaaaggctgctggtgggccacatggtcacgatactttcaagtcacaccctactttgtgaccttatcctcagagtaaaggctttagaggaaaagggaccccacagtctcacccattacctggctgtcagcatctccatatgctcctggctgagttttattgagcatcagctggggatgtgagcagaaacctgaatccttgagacaggtggttttcaaaaaggaagccataacaatgagtggcttagtactggcaattgatcagttggtccatgaaatggagccagtcaagttctgtccttccttcccctcccacatactttgtcaagtcccaggacctactgatatgggctcagcaatgacaaatgccrgagtgctcagaggacacacccatcccttttcagggtgtgaacccagactggaaaggagaaccaaaggatgggaaaggcaggcccgggacggcttgctgctgctcctgctttcacaggaatcctggtcatgccaggaacactgccgcccacttggggtgggactatgtggaagtctagctagtgctcggcaccccttaacccaatggtgagaaacaggacaaacatgctgggggttcagagggtggaccgcagggatggcccccaaacaggtcccagtgaggtaatgcaaggcctcctctcgggggctgatgaggtcttctaggccacagactaaacgcactgcccagcctttagtttggagtgtgacttgcactgactgaaataaatctgacctgtcacccttgggggacatctcagtctcagatcttgctccagacccaacatctcctgcttgaaatgagacattaagaaacacacactcatccagtaggaactgcacacaccaccaaaaacgttcccctccccacaaccctgcccctttatgtttgtctagcaaggcactaggaaatggttcaagtttagggatttgctctatatttgcatttttctttttaaaaggcacagtttttattttaacgacgctgcattgctctttgatgatgaatctcaattcgactcctcaaactgtcaacactcttgttatcctagattctagaaggggcctcatcttttgacttctttctatagagggccacttctaaagctacagcactcatttggaaaaggacactgggatsaacacgtaagcgttgcaagcacaggggccgcctctcttgcagacaggtggccaaagcagggcttgtgctgggccagaagtggaagtaattcctcgccagctacacattcagtctgactggtggatgattgggagtgtttgtccctccctcccccaataattgatggccttgagatctgccagcatctcaaaggcagattcgtggctctgttcccagacttaggtctcagttatttaattggtaaatgacacaatcaagagactcaacactaattggaatgctgatttcaagtatttcctgggctagctggtggaagccatagattgtggaatgtgatttccatttctgaatcagtgggtggcaggttggttacagaaatgcttcctattagtctggaggccctctaggagtctgacatgtaattaacaaagcaaaaggtaaacatgaagggctggcatggagctgggtgtatatctggctgtgggacrtcgggttcttttctycactgcaaatgagactacagttgtgaygatggtgggaggttccaggggtgcaggtcttcaccaaggaccatgttgtaccacagcctctgctgagctgagggacacatgtccccctgctttcccaacaccaccaactttggatttcacagattgtctctaggctgggggctgccttgactgtattacacctggctggctcctttaatcacagcattctagaaatccatattggatgtggaataccagaatcctatgtagcatcctagtttgcaatccaattatagagttctttaaaaattctggagttctgtatgagaactagaaccatgatgaggtcagaggcaggcactttgcccacagttgatcctggaggcctccagactctgtgaggtgagcacctcgcagcacctctgttcctcttttgaggccagtaattgcctggggaagagagacagggaaatggaagcatggatcagggcaaatcagccagcatttctagtttggaggtctacctggccttttccgtgggctcagggccatctgaaacactgccctgtaaagctggtgctrggctgtccttgtgcctgragagtgctaaaattgacatttcaaatacccagagagcagggggagatatcccgcatgtccatagctgcaaagaaatgtctaggggggctccctcttctgactcctcacctggcagctgatcagcattcaatactgaacactcttagggccccaagtatggcctttgaccsgaccaaatcacctggggttgtgacagagaacagaagctgtgcagtaactgcaatgttycccccaggacggcagaaactaaaaagccccaagaggacttctttctcttctgctgcagatgagtggcatcgatactaaaagctgccccaaacaggcaaattttacctttgtttctaaagcaccatcatgtaggagagccatctgagggctgggcaacctcgcaggactcacttytgggtggcctaggctaccttggtgttctcccacataatgttcaaggggacatagtgacaaagttgaaaaggctctgttgcttttccgtgatgtcagcagggattaaagcagtctctgctccctgtggggcctcttgtgggatatgctcttcaccctacccccacaactcaggggctcaaggaccaggcagaccccagcccctgaatcaagagccctcttcaccctgaaccatttggccagcaccttttacacctagtgcccacaggggccctgcctcccttgaaagaggaagtctgcagtgagtgccagaccctggggggcctgccaaggggacatgagggctcagttcctattgaatttttccaagactgttgagttggtgtgttcaaayagccactgctgggtgagagaggatgggttgcaggtgttcatgaagatcctatggtcactttcactgcagtccatgcagctgccactgacagggtggtacagggtcttgtcctacaaaacatggaggtaataagccagacagcactggagacatgtggccagtcaaaccacagcaacaataccagcaatgagaaagtgaggaagtgactgactgactagctgttcatacacctgttggttttcctcctgagctcacaagccggatgctgcccagcctcccttgcagctggtattgccgtgggactgggttctgcccgctgggatgtggccagaagtgatgcacgcagcttccaggcctgggacctagacactgcccacctcctgtcagacctcactggtccttatcgtgtgtgtgtgtgtgtgtgtgtgtgtgtgtgtgtgtgtatgtgctttccttttatcttttatttttttwatttttttaatttttttgagacaggttctcactctgtcacccaggctggagtgtagtggcacaatcttggctcactgcaacctctgcctctcaggttcaagtgcttctcctgcctcggcctcccgagtagctgggagtacaggcatgagccaccatgtctggctgatttttgtatagagacggggtttcaccatgttggccaggctagtctcgaactcctgacctcaggtgatccacccacctcagcctcccaaagtgctgggattacaggcatsagccactgtgcccggctgcacttttctttttaaatggaatcagttgccaacatttaagacttgaggatttcacagtgaagtstagatttctgactactcttgaatgactacaaaatccggcatggtaggtttgtggcacaaatgaataagtggatgggctctgttgaaagaaggggtgaagcactgtattgccttaaaaaaaaattaagcaggtgccctgctccyccygcatcccatcttactttgcggtatttccacagctggttgccyttcatgctgtggcagtcgtacagcrtgacagggctggtgtgggaaatggcatcaaagcagaacttcttggtgtgctgggggtctccaggccggatgtcctctctccaggtgaaggtgaatacctgtgcacaggggcatcataaatagggatagcaaagccaaggactttctttttttctccattttttttaaattatggaaaaatttaaactcagaggtccaaataataatatattaacctgttctaaccacctagctttaaaagttactaacttggccaggtgcggtggctcacccagcagtttgggaggccaaggtgggtggatcactttgaggccaggagcttgagaacaggctggctaacgtggtgaaaccccgtctctactaaaaatacaaaaattagctgggtgtggtggcgtatgcctgtaattccacctactcgggaggctgaggcaatgagaatcacttgagcccaggaggcagacgttgcagtgagccgagactgcaccactgccctccagcatgggggacagagtgagactctgtctcaaaaaaaaaaataagttaccaactcaaggccaacgttgttgcagctctacttccacccctatccttaccctcacagtattttgaagcaaatctcagctatcatatcatgtcaggtataaacacttcagtaagtgccattataacatctaaaagtagttactacaaggtccaaaatgtcatcaaatatccacagttcaagtgttcttgggattcttttttttgtttgttttttgagacggagcttcactcttgttgtccatgctggagtgcaatggtgcaatcttggctcactgcaacctccacctcctgggttcaaccaattctcctgcctcagcttcccaagtagctgggattacaggtgtgtgccaccacgcctggctaattttgtagttttagtagagaaggggtttcaccacgttggtcaggctggtcttggactcctaacctcaggtgatctgccaaccttggcctcccaaactgctgggattacaggcgtgagccaccgtgcctgctcaggattcttatcaatttcttttcacagttagtctgagtcaagatccatttggttgataacctttgttacttttcagtagctttactgaataataactggcatacaataaactgcacacatttaaagtgtacaatttgatacatcttgacatatgtttacaccgagaaaccatcatcataatcaaggtaatgaacataccattaccccgcaaaagtgtcctcatgctcctctgtaatctcctcctcctgtccccaccaacccccatgtccttaggtcagccactgatctgctttctgtttctagagattagtttgcaatttctagaattttctataaagsaatcatacagtatgtattctcttttgtgtcattctttcactcaacataattttgttgagaatcatctatgtcctaacagcatttatcaataattcatcgcttgttattgctgaatttgcactccagttccttgttacaggacatcttggtggtttccagtttttggctattacaaataaacctgctatgaacattagtgtacaagtctttgtatggacacatgttttctttctcttggataaatacctaggagtgggatgactggttcaatggtcaactttctaagaaactgccacagtttcccaaagtggctctgccatttacactcccaccagcagcatacaggtccagttcatccacatctttgccaatcttcagtgtggtcagtctttttaataggtgtgtgctggaatttccttgtaattgcaagttctatttctctattaactaatgaaattcagcattttaaatatgtttatttgccattcatataytttttttggtaaagtatctgcccgctttaaaattaaaaaaattattgacttttgagagtttgagaggatacaagtcctttcatttatatattctagatacaagtcctttatcagatatatgctttacaaacattttcttcccatctgtggattgctttttattcattttgaattagtccagtttttcaattttttcttttatggattgtgtttttgttgttgtatctaaaatataattgtttatcccaatgtcactccacccaggctgcagtgcatggcacaatcactgtaacctcgaacacctggcttcaagcaagcctcccctaagcttcccacactgttgggattgcaggcatgagcccactattgtctgagcagtggctcttcctgcaggctggcttaccctctgcatcccacccatcctgcaggtgaggctgaccatgcccctaggctccaagagtcaaggtaatgaacacacccatcacctctcaaaagtgacggctctgtcctcatcaatatgaggacttcctcacttcctgcataatcagctcagggacacaattcatgggagccccagggcttttccagaactcttggaagtggcatgcctatccatggggctgctgatggccacatctgctactatataggaagggccaggttgagaatgaggcccgcagagagggaagcactctcttgagagatccagcaacatcatcaaggcttttcagggacatgagacaataacgcactttttgttgaaggccatttgggctgagtgtccatcatttgtaaccaaaatggtccagactgatggttttattgcaatgtgaaggaatcccctttccacggtgttcaggaagatcttaaaactcatccccggggctgactcttgtcatttatcactgacccatgcctctccctcccagctggcygtgtcagcaccccaggctgcagatgtttcagagaacctggctgccagtccctgaggggcggcccttacctgcatgttgttccaggcagcctccccacggcctcggacgcagccctctagccttagtggggagcccaaggccccrtgctttgtgtctgcacacagccctgtgcccacatttcggatctgaaagggaaagagggaagaagtggaccactgaggtgccttaaggtgcccaccgggtccctgccaggtgaaaggggaaaccaagtgggagacattagctggattaaccttcaaatcgtcttgataaagcttgccctgggctgttggaagtaccttgagcctctcaatgaaggaagactcagtccacagaatgtaatccttaaagcactgctgtaagtagtattgtagagtatgcagagtcctgggttggtggtgggggagtggaggtgaggagttggtaaaggactccctggccctactcctggagaaattgaaccgacaggtccaggaaccagattttacccccattccaggtgactcaggtgcaggtggtccagggaccataccttgaaagcgcctagaaaaggacatgaaacctttgctgtatgtcatggactgtctctgtcccttaggacaggtgaatggcaagaggtggcaggaggccccctcaccccctgctgagatccaaagaacaatagttgcctcttccccttcaaccatgaagacgggtgtggtgggaagagcactgggctaggagtctgaagccctaggctgctcacttgcttagccaacaaataccgattgggcacttactgtgggcaggccattgtgctaggtgcatagcgtcacatcatgtagttccaaccttacagatatcaatcctactttatctgagggatagggggctgtggtggctatgaaaatgcaccacccaatttcctgttgcagagagtctcattgcacccagatcctgtattctgaatccaccactgtgtccacccatggatggatcccagccaatgggtgaggcagacccactcttgcgagatgttgaactcctctggctggtgatttggcttggggactcttcatcaacctggccaaagcttccttacagctttactgcagtctggactcttcctatcccggctctccttccttccctcaccccttcacagatgtaagaccactgttgtggtctcatggctctcctagtctccccaggtgtcttcatttttcctctcaagtgttttaaccataaatctcttgcgtgtctaatcccactgtggcatctgcttcttggaggacttgaactaacacaagtgaggaagccaacaaactagtaaagagccaaagagcctcatgagggaagtccacacagcagtgctcctgcaaactggaggtgatgttggggtaggctagccaggcagctgagccaggcaagggctctgtgactgctgtgtgaatttgagcaaatcacagctggtgttcctgccagcccaccatgcctctccccttcctctggtaacaccaccctgactttccatggggctactgctcctcacgcgccctgtggccagccgtagtgtccatcctacccttgcttttcgtcttccccgatggccccagtgatgggtgcaggatccaagaataagacttgattcctgcacctttactggtatactgggaaagaggcatataytttctgctgggttggccaagcagtaggggttggtcagcctgaagcttctggaagccattttgataccttcagcatgaggccaacacaaaaggaacatgagttcagcaggagaagaagagactgacatcatttgaagccctggatccaggttgtcttaagccatagctaccccaggctcatatgtgagtcaaacacaatatattccccccatttttttttactttaaattggtcttctgaaagagccccaactcttatgctccycttttccaagctccaacctatccatcaatgaatgggtaggtcctctcagctcagagacccaggatcccatggtggcatgctcgtctgcttgcaaagactggtctgcctcggccagcatgggcctcacgggccrcaccatgcgcagttcacaggtccccatgctcaggagggcctggcttgatttaaagctctgctgccactgtcttgaaattctgaataattttatctttgaactgttttgtaagtgaaatctgatgggacactggagcgtgtgcatgagcagagaagcaygctgttcctctctgccctgtctgcatgcagcatgtgcgaagacactgaataaataggggcgctgggggtcccagaggccctgctttcccttcaaaccggaactcgctctgggtgtgctaagaagggcaacagcatcctaagaagcaggaacgaccaacaagtcctgtcatgttctttcttacttgcgttactgccccgtgttagccaagaacttatgaaggaaagggaaagatagggcaacccttagttccttttctttttcgaggcagggtcttgctctgtcaccaggctggagtgcagtggcacgagcacagctcactggaacctcgacctcctgggctcaagcagttctcctgcctcagcctcccaagttgctgcaactacaggcacrtaccattacgcctggctaattttttcttttttttttttttttttgtagagacagggtcttcctatgtttcccataggaaaatgttgtcaaactcctgagctcaagtcatcctcctgctttggcctcccaaagtgctaggattacaggcctgagccactgtgcctggctccttagttcctttgccttccagccctttcttactcatcagtaaatggaaggtggagagtgttggaagaatatgcacattatcaagaagtgaagtaaaaagctgagtttgttgtgtgccatgtttagattgttctggtgagaaatacttatgcatgcagcaggtgggaaatacagatcatgtcatttcacccattctgaacatgagttacatgctgttaatctgmattttaaattgtcactgcataatataaagatgaaaggtaaaattcatgctaataacttaaagttttaatttttctacactgagarcactaactaacaagtaaaaatacaccatgacaaggctagagagagaccaggaaagaaaggaaacgattttatattcacgcctttcctccctgcactgactttctaccttttgaacatgggatctgcatttgcattttgcacacccattaaattatggagccagccctgccctccagactcacctccccccaagctgcagccgggggctccacgggtgggtagaatttgggcaggtcccaggctatcttcgtcataaaccacttgaaactcttgcagttaagggagctgcggagctttttctggactgcgacatccccagcggagaggtggcggtattcaggccggcgctggtaaatgtactctgcgtactcatccatccacacttcggccacccgcttaaggttctatggggcaagaagcaatggasgggtcagtctttccaagaagccaaagccaggcagtggggtgaaaagggtcctggcaggtcgaggtcaacccttcttattttatgttscatcaaaaatcccagccccaccgtgagtttaggccttctgtgtttctatttatcattatgcatgttttaagggcttcacagcttatagttggcccataggctgctgttgttttgcctgcccatcttccatcccatcttcttctagcgatagcccccactgattttcctctggggagccaccctgtctccctgtcagctcatgtggcaggaggaaaggcatggacccagcctagctaatgtgaatacaggcgcccccggtgcaggggctggtcaaacagcagacccattccctaagccccaccaatcacaaccaacaggcatcagccttgggatttttgcaggaactattggaagaatcgttctgtttctgcttggattgctgggtaagacaggatgccagccagagctgctgggccatatggcctccaaggagagacaaggagagcctgtccaaggatgaaatcaacccagaatgaagcagagcggagggctggrtccaggaatgcattccgccttttaacaccagaatccagccatgtctgaagctagagctaccttggactttccagttacagaagcctgtatattctttcttcgctaagccaatttgatttggctttttgtcattttcaactgagagttttgaccaagytatgtgataaaggcaaattataatttgaaaccaaaaggtgtaattccatcagcagctggaatttctaataatcctttgaggtgcaaaggttgctgctactttcatcatgaagcacaaagataatcagttttaaaaaatkacagccacatgattggcaagcagaggcagcaggtgaggaaagtgtttgtgagtagacttggggacagaggaagagggaattcttatgtatgtgatgaaaattcctgattccatctgcagtgtagamcccacccagtgagaacttctgatatgtgatatatctgagagcaaaacttcagggttcaggggaaattctccgctccaaaacatctttcttcaacccctggctgttgtccccccaccccaattttaactcttcggttttacctccttcgtaagttttttccctattgcaatctaaaatttcctctgaaasgttaaaggggagttagcagtttaagctgttatcagtcatttgcacctcagtgtgaaggattgctctaggagcagaaggtcaggcaggggtcccaaatgtttaaatgtcttctataaagagccggatagtaaatacttaggctttgcagaccatatggtctcacctctgatgtagctataaagcagccatagacaccatataaatggtgtggctgggttccagtaaaacttatggatactgaaatttgattttcatgtatcacaaaatattcttcttttgattcccattccctctaatgatttaaaaatgtaaaaaccattcttaggtcacaggccatacaaaaacaggctgctgactctggagtaatggagaaggaagccaacatgagggaggcccccgcactgaagacaaaattcaccagttcccccattttgctggctctgagttggggaccaggaaacagctgaatttccttgttgctacctagttcttcctgagtgctgaagagtccacagtgggttagaaaacagctcaggaacagtgtttatccccaccaggcccctgcacagaaaaggctgtgtttaatttaaaactgtgctagaggaagttgaaggcctaacagagactgtctacatgaacactctgaaacacaatatttcctctgctttttccagtatgtccaccaggctcttttgkctcactgtctaacctgctcgagtcacagaggtaatgagggtagtttcactccaactgaaaacaagtctggacactctgaccatggccagactggttaagaatgatactgaaatttaccagtgtcattcttaaaggattgaataacrtcatattttaattctaattataattaccattttaattaatattgcataattgtatcttccagacacagcttgaaaagctctttctcccagattttgaacttttttgctacagttcactgtttgcaccaaaggaaatgactttacacttatttctctcacatctccccttgttagagacataaaaaggaccttgggatttcagtgggcttcgggctcctcatacctctactctcaacaccktcctacttccgagtcccagtcccgtctgaggcccaactgtacttcttgtgcttggattacagagatttgcctggatccttggagtaagtctccatttttgtttcaccaagtttgagtagtttctgttattgccttccctaagatcctttttccagaggcaaagatargaaagatttcagcaagtttagtaaacaatgtaagactggctacttgttcctgaggcaggcaagctggtggacagctcatccttcctgaactgcttctacctcaaggctgtctggctgtttgtccttccggagtccgtacaatctcagtttctctctctatctggctctctcggagctattaggacaactctcaaatctatcaaaatgatcatctaggggacaatgctctagaaggcttaggatgtggttattaaaacattgagcactttttttccccccaagatggagtcttgctctgtcgctcaggctggagtacagtggctcagtctcggctcactgcaacttccgcctcccgggttcaagccattctcctgcctcagcctccctagtagctggtattacaggcgcacaccaccacgcctggctaatttttgtatttttagtagagatggggttttgccatgttgaccaggctggtcttgaactcctgacctcaggtgatccgcccgccttggcctcccaaactgctgggattacaggcatgagccaccacgcccggcccactgaacaaatattttaaatgtggtctgcaagtaattgagggttgttagtcaccataataaaaggccgcacctgattcaggcatctctgtggttctgcgaacccacacataatcagacctgatggatcacagagtccctggggaagaagccatgaggcaccactcagattgttaagtggcttaaagccaaacacaggacgatgcttcagtacagataggtaaaagagaaatacgttaaaatgcctaaacacagaatttagataagacttttaaatacatgttccagtctttattgttaatattgatgctaacactaataacagcagtcactgtttaaggaacaattgctatgtgccaggtacctgtcagacctacacaggtttgaattctggcactagttacttaatgtttccatcgccaacatcacgtttcatgttccccrtccctaaaatggggttaaaaacaagtgagaattaagtgagataagtaaaatgctttgcatgcctggctcgaagggaatttttataagtattactacagttagctcttatccactgaattaatctataataatggytctataacaagcaggaggcggtaatgtctctttatsaggtgggccttttaaaaaaaaaaacaacagcaacaacaacaacaacaaactttctttgagacatggtctcgttttgtcacccaggctggagtgcagtggcacacacagctcactgcagcctcgacctccctggcccaagtgatcttcccacctcagcttcctgagtagttgggactacaggcacacaccactgcgcccggctatttttatttttaggtgagccttatcaacaacagctctgcagaggaaaagaatgctttagggttgctcctggtctggagttggagtgtccccatggtcccttgtagccggaagagtctcagtcttgggcgtaccgagagagcgtgcgcttttcctgcctggcwccctcctcagggatcgccaaatggcctttcagaagaacgcgattcctgcttcaagggactgaacctagaacctaccccccgcccgtgtcggatggggctgtgggcagcgcggatggctggtgagggcgtcgttaggctctgctaccactggagggcactgccggctctcctttccctccacgcggcccctgacrcttcccggagctcagctcccacccactgatggctctcagggagacgcgcggcctctttgagcctctcggctttccttgtaagtcacaggacaacgstcttctaggtcccgggggctgcaattctacacgtcaaggttgtcaagtggaggaggaggcagcgccctggacaggaggcagtgcggtctaatgccaacccggccagcaccggggtctcctggccggggcggggctcacaggctccccggagggaaagctgtgcgggggtcctttccagcttccccgcaaggctctttctatcctctggggaccctccctcctcttcatttttcttttgtggtcacctggatttatttatttttttccgaatacatttaatatccaaaccaaaaacaaactctggctgacagatttccatttgcagccagtggccaatttaattgaagcaatgattgatagaaaccattttaaggcaatgaaacagtttgacatgcagaggttttggcagtaagagtagacagggggtgaggagaagagaaagacactgacatttatgaagcccacttcccctccagaaatttagtacgcaagctttcccaaacacaccacaccacaccacctgtattaatatttatctaacatgtttttttacatcacctctggtctaactttgcacctactttagctgtatgctaagtaataatatctgtgaaattacaggttagctacacgaatacacattaatttagaatccacattaacttaaacacatgaacaagaaaacattcctgtgtttgctgcctaagatcgtctcctctgtcacactytgggaaacagtatcacctccttaattctcctggcaatgctgggagttggaaagaattagctctctttaaacaaaggaggaaacacaggttcagaggacttaagcaaccctccccaggtcacatagcaatgaatggttaagtagggatttaagggagttcttttaaatcagatttcacctggagaatgggaggcacatcctcaaacccagagatcacataacacagtctagggccccagggtgcctcagtgcagctgatggtcctaggccaaccccttctacccgccaaggaaagccaccaccttacccgggccaggctgactccrgccgggaccttgtagggcacatacttcctgtagatatggcccaccctggagcaggggatgtcctccatgcggcccccacacatccacacctgcatggcaagaaggaagagagaggatgacgtttctgcttccagttcaccatcccgccaggccagcatcccttagygcactcagcaaaagcatcagcctggattgtctgctgaagcctggatcacagacctaatgacatgggaaaacacagtaatataataacagcggtaaaaacagctgacagcactgagtgcttaccattgccacacactatgctaagatggtcacatgcacaaccacacttaagcctcatcagaaaacctataaagtaggtagtaacattttacagatgctgaaatggaggctcagagaagctaagaaatgtgactcaggtcacagagtaagtggtggagccaaaatttaaaccctgttttagctgacttcagaatctgagctctaatccactatggagtgctgtgttgagaattctagggtggcatcgggggatcagtgggaaagaccatggtgatcacaaagtgacatcagccacagcataagtagtcaaggtggcacacaggttccgtagatttactgtcacatatttattttcctcctggatctatgagcctctcgctgggtctccctgagcagttccgtcagcctccctgccctgccttctctgagtctggcttgctaggctgtgcagctgggtcttgccgcagtgtgggatctgatggttctctttgcctccctctcccagggaggagtatttgacatcacagagagctcctgagtttgcccactggtctgatagcaacttgggaatgtgaacatgtacagccaatactgactcatacccactgaggggcccagcctacatagaccctccttgggaggcctgggtttgaatcctggctcagccacttacccacttgatgactttggcctacacagaccctccttggcaggcctgggtttgaatcctggctcagccacttacccactttatgactttgattaaggtacttaacttctctgagactcagtttcctgtaaagaaatagaggaggcaggactggaagatgagatattgtgtgtaaaagggtttagcacaagatctggtgcatactcaggacacagcagtgaatcagtcagccgaggccccagcctccgaagtggcctcacaatccctgcctcctcgtatttgtgcccctgtgtagatgcctcccagtgagtcacatgaggactgacctgtgtaacccacaggatactgcagaaatgacggtcataaagatgccgtggcttccacctttctctgtgggaccgctggctttggaggagccagctgccatgtttgaggacaccccagccatgctgtggagaggtccatgcggtgagagctgaggcctcctgcccacagcactaatttgccagccaggtcagtgagccaccaagaagcagaggtcgtggtcacagtcaagcctgcagatgactgcggccctggctcatggcctgactattctcctatgcgagacccaaggtggagctatcaaaccaagccactcccaaatccctggcctagggaagcgctgccatcataactgtgtattgtgttaagatggattctgggggtaatttttcctggcataggtaactaacatgggagatggtttcaggtggcgatggcagagcagggccattgcatagattcgttgtaggggtgtatgggatgtgagagatgctactttatgctccccagtcagggaaagcctcacttcggaagggatgtttgaggtggaaccaagaaggtgaaagtaaaggcaagggaacgggtgggagaagagcaagtgcaaaggcaccagggcagggccaagcttggcataatcaaaaagaaagccagggcaggagcagagggagaaaggggaagagggatgggaggggaggccagagacgcgggcagggctcccgcagggscctcacggggcagaacaaggagtcttcacagaaggtcttcagtgagggagacacacaatccacttacatcttacaaagatgactctgccagtggggtggagaacagcctgatggggcaggcctcagggagagtaggcccgggaggctcttgcagtcgtcctgatatgagaccgtcctgaccctgggtgaggggtgctgaggcgatggggggacacagctggattcaggacattattatgaatctcgctaccatagtctctcatttgtggaatggggggcaggaatggggacatctgcaaaccagattctgtgcaaaagtgctcttttcagttggaactgctcgatgaggtcgtggggattgggcttcacatcttgattaattcaggggctctagaagggcttgctcttccacctggctcctaaaaggtcctttgtcccccactacttcctgctgtctccatccccagccctgatgtactctggccctcccgagaggggatgtgcacagggctgcaattaktggaagtgctgcctggagaaatgcaattatattctgatcttgggggagaaaaaaaaatccagccagtcaatagaacagaacattggtctcgagataatgggctcctgatggtagattaatgtcaaggccaaaccaagaagtttattttcaaagcaggagatattgatcaggcgccagcatcccataacaataactcttcctttatacaaagtgattgatgtggaagtgatgcttttgcctggcgggtatkgcccaggtcgctgctgggctgccctctgcctttcaggtggtgcagtggccctgagcaggtgggacaccttaccctgctctatttctgaacgtctcccgggcagttgatcaggtcggcatccagcttccttgtcttcatattaaacttgcattagctaatgaggctctgtgtccagctctgcttggcagaggcacctaactttatgcaggtggatgataaatttccaaatccttctctttgctgtgacctctggtttctttggccccaatcatgctggccatcagcctgaaggttcctgagggaccagggtgaccctgatatgtcgggaggcttgaggcatccaggatgccctcagattcctgggatgtctggagggtttggtcagtgggtttactccatggcttccctgcccagcacaggatgccctggtggccgactctgaatgtgaactaccctcaggaagacagacatctgctcagatgaagctgcttcactcctgggtcctttgagagcatcccagtgcaggccacgcccatcacttcagaatgtcctctggcctgaccaagagccccgtgcagccctccaccctcacytcattccactcacttcttgctcaccacacccattgactcccctcatagactcctccctctgcctggctacctcatactcatccttcaggtccccttaagagccacctcctcaggggcttctcacccttttatacctacacacagcatcttgcttcattgccttttaccagaagtgaaatattaattattcacaggattatgtccctggtctaatctccctgcaatgggcatctgttgtttttgcctgtccagtgcaccttctccctattggggactgtcctyccaactgctccacctggggcctgtgacccaggatggccagctggagcacccaacctcctgggctctggagctggtgtagggcagggtaatggggtatatatttaatggtcgccacacatgctggtgcttgatgtgatggccacacactttctctggggggaagaacaaagtggacaacacactgcagctgccagtgatcacctctgcaccacacagtaagggagggcctgtccgtgaatgcagcgagcacccagcagggcagtcccaagagagggaaagagacacctgtttgagcacctggaagcaggcctgttgaagacagcccctcacccccgcccccgccatggcttttctcggctacggctagtttaagatgattttgtcacttttatatttatttcttttcgagacagggtctccctctgtcacacaggctagagaacagtatcacaatcactscttactgaagccttgacctcatgggcttaagtgaccctcctgcctcagcctcccaagtagctggggccacaggtgtgtgccaccatacctggctatttttttttgtagacatgggggtctccctgtgttgcccacactggtcttgaactcctgggctcaagcartcctcccaccttgacctcccaaagtgctaggaatacaggcatgagccattgcacccagcctttctgtcacttttaacattaagagtccttaccaacccctctgtgccctgccagactcagggcmagtgttggcaggagtctcatctgttgtatttgccattggacccccagtgcctagcacagtgctctgcccgtaagaggcactcggtcatgaaagaggaggtgaatcaagactgattcaaagtcttgagcatagggacttgactagagagaaagatgacctcattttgtcatccattcttcagtcactggctccagggatgaactgtcttttttgcttccagtaatcctagcaacaatataagccatgagcagggagcccgaggtttccttgtttctcgggcagaaggcaccattgccatctctttcgggctggatcctggctgggtttgtctggggtgaagtggaacagatgtaggaggccagagagagcatcgccgtcatgctcctggcttgctcacctccctcttgtgacaaacagctctcaactctgccacggagagacaggatcccaagacaggaggggactctccttccaaggacgggctaggggggtggtgctggccacagatcccaggccctgtggttctgctcatggcccaggtcacttgtcctttgtatctttaggctcctccctttcttcacagcagaggtagtgaccatccaagacccagacagacactgcagacactgcagcctgactcccctcataccagtcctcataccaccaatgcctgctatgtgacctcctgcaggtcattgaacctgggagcctcactctcctcaactgtgatgtggggatgatgatggctgttgagatggcacaagacagtgtgtgaaaagctcttagcttggtacctggctcttagagaaccagatgaatgttagtcatttctacttgcagaaggacgagaaacaccaccaccctgaaattacagagcgcctgccctctgccaaacaacatcaagttttttcaccctatggcctgatttcccaaatggagagactgaagtgcaaagagaggaagtattttttcttaactaacttggtggcaaaacctgcaagtgaccaagagaatgatattattatgaatctcgctaccatattctctcatttgtggaacagggggcaggaatggggacatctgcaacccagattctgtgcaaaagtgctcttttcagttggaactgctccatgtggttgtggggattgggcttcatgtcttgattagttcaggggctgtagaagggctgctcttccacctggctcctaaaaggtcctttgtcccccactacttcctgctatctccatccccagcccagacatactctgttggggcaggtggggtggggcagggtccctgtataccatttggggcctggccacccaagagcactgtcctctcacccaagaggcaggagcagagtccagctggggacaaagagaaggggagctccagggatggcagcagctggatcatctttgaccaggaacccatcttgttcgagatgcagacaaatacaggccactgagatgacattttgcagttcctctccttgtgttgctgtcagctttctccctgccctgtcccttcaactcccacccctgtagggggatgcagctgtctgctctgggtcccttgctgctccaccgcaggagttcccagcacaggagttcccaaacatatcctgcyagcttgtttccaggaccctttcactgcccctgtggcagtcttctcatagaagcaccatgcctctagacaagtacaaatctaattgtgaaagcctgttccccattcattttcattgctgctttgatttattttattagcaaacttcttttgtgtgatgacaggcttcattacagtgcctataaaagacaattacccgctcttatctcctaaactgagggggaaagaaacgagtggtgatgtgcattgggaaaacacaatgggacccagaaagaagrgcgcagtggaagggatygtccatggaggggaacccgagagggcaggggctggggcagagcttctctctgttgaggaaatggctgcctggaagctagccaggaatggcacggcacccgacctgcccagagataaggaaaagactggcagctggccacggcttttgccgttggcatctcagctgaggacccctatgaagttcaaaccctaatcagttgcatttgggggaaagactayactaataattgccaccaatcattcagcattcactgtgtgcttaggaggcacatagggtagcagttaggagcttggttctggaattagaattgaggtcccacacaggctgttaagcaagttttataagtctgaaagcctcagtttcctcctctgcaaaatgggaaaaattactgtgcctacctccttagggttgtggtgaggctaaaatgaggtaatgtagaagctcagaggacaccgtgagctatccatatggtgtcctgtgggcacgtggcccatcgctactggtggagggcgttgcatgaatgctacacaattcccggctgaaaagaaactcatattattttgaatgtattagtttgttttcaacaagatattgtttcaagaagtatcaccaccatgaaaggacaacctcagtcatgctggttttggatgtttactggatgcagctggtaaaaaaaaaaaaaaagtagaaaagaacaactttagttttaaatttacttctaaatttaagctgtattttttttttttgagacggagtcttgctctgttgcccaggatggagtacaatggcacaatctcggttcactgcaacctccggctcccaggttcaagtgattctcctgcctcagcctcccgagtagctgggattacaggtgcccaccaccatgcccagctgatttttgtatttttagtagagacaggttttccccatgttggtcaggctggtctcgaactcctgacctccagtgatccaccctccttggcctccccaaatgctggaattacaggtgtgagccaccgcgcccagcctagtatttttatatgatacagttttaagcatatgtgcatctaaattaataaattaaacataggactatctcaacaatatccttaagtgtttatagttagttacttccccaacaagggcgagatggttactttacattaggttttgactcagatttggaaatacagcaatctcacagcaacccagcgagggaggcacgatcacaccctttacacatgaggaaaccgaggtttacttaacactttccccagggttgcccagtgcataaatggcagaacccaaaatggaacctggggttgggtcagaactaggcagatctgagagttccacagagaccaccctatcatggtcttcctcaaagatccctaacagcacttgtattgtctgcagaacaaaggggtcacccttggcttgcaatcaggccctctgccacctgctcccatctatcacctcctaccctctccatacccgctggactccctatgtggatgctgctgacaactggccgcaatgcattcacttttctgcccygggggcttgtgaatttttctttctgtgactgttgaaaccccaaacaaacattaattacctaattcattcattcattcattcattcattcatacatgatctggtcattggtcaggtttgttctaaaaaccatgctggaaaaaatggaacagaaaygaactgccaagggtggaccaaagatayagagccttgaaagccgggtgaaggtattggaacttgttggccaacctgccaaccaacctgcccatttactctgtccttccacacccacgcctgagcatcctctctgcacaacctcccacctattcattacasctgcgattttcaaccttgggcctcatcggaagcacctgcagggcatgttgaaacacagctggctgggctccacggcagcctctgactcagcagcctggggtggagcctggtaatttgcatttctaataagttccccggtgatgctaatgctgctcgtccagggttcacaccttgggagccaccgcgtactggaatggtgacagcgtctcaggtgactgtgcctgccagttcacactatatttcctaacagccctgtgaatttgggatgattggtgcccctctgtagatggcgaaataaaagttcaggagaaagggcagatgagtccaagatctcacagagagtttgttccagaacagggcctagagccaaggccttttgacctgtcttgccagcctctttccactcttgtcttcctgcaaccacagcccgatcacaataaccacaaccatgctgacattaacagctatcatttagcgaacatttattatgttccaggcactgagctaagcttttaatatattttggctcatatcatgctcacgactgcactatgaagtaaagattattcyatcccctaaataatataaagaggagaggttaagtcactttcccaaagtcacacagcagctagctcattgaatttgcactagaacccaggcagtttgatgctgaagcccatctgtgtaatactgtgctgttctgcctccttacctgagggttatgatcagaacagctgccacttattgagtgcctcctctttggttagctctaggccaaatakacatatcatcccatttagttcttacaacaaacttttgaagaagttattttattaccacttttagggatgaaagagccaaggcaccatgaggtaggtgtgtgctggttagggagtaacatacacacaggcgaccctcgggcctttgagccgtctccttggaggagtggtgggagaagcaggctccacaggcagggacactcatggaatttcaaatgacttgccgagagtcatgagcagaatgccttccctgtttctagcagacggctcttgcaaaggctgggcatatgtggccccaggacgaaaatgctgcatgtatcagagcatatttccatcatccttggataacacagggaaaggaagaaatgaggaccaggttcctggcagccatgctgcagctgtccgaggcagagggtgctggtaggggcagggaaaaggatggggaaatgtattgccatatagttgcctgatggtggccctggatatccttctggtgcttgggctggcctttggcaatcatttctccctcctgtgtggcaacttaacccctctcagggctggtcctgacctctgggcccttcctggaacacgggcctctctttagactggatacaccttttctctactcctaccaccaggcggaatgagatgagcactgggcttggagccagggcatctgggatttagccttggcactgccaccttccggtggagggaccctgcccagtcacctaaccgctctgggccasgttgcaatatcacccttgctcagcttctgggtgtgtcctgccttcttttcacacgtcctgtttcacttagtcttcttgataacactgagttttatgggaaaaaaaaaaatcagagttttttttttttttttttaagtctgttcacgtagcctgggactgggctagcctttcagtaaccatatcagtatcacacaaagcgaaccccagtctcctctgagtcttcattcctctacccagagaatgggttttcctctcagaacaagctcaaagaccttcctgacttctgcaggggagggtgtcctccctctcgtcccctcacatggctttctatcactcccttgctcctgcaagcctgcctcatggaaccctcagaccaatctccattttgccaaggacggtggggcccacctctgcctcttggagcagaccctgcagagttgctcttggcggcctcaggccttccctgggagtctctgcactgctgacttgtgcagaatctcatctcagagcttgcaaatggccccaacaatgtgctggaatgtatatggatgggggtgggctggaagtgctgagaacccaacattttcttattttttttttctttcctttgagacaagttctcactctatcacccaggctggagtgcagtgtcatgaacatggcttattgcagccttgacctccaggctaaaggaatcctcctcctaccttagccttccaagtagctgggactacaggcacgcagcacaccaccatgcccagctaatyaaaagaacttttttttagagatgaggtctcactgtgttgcccaaagctggtcttgaacttttgggctcaagcaatactcctgcctcgacctcccaaaatgtgagaattacgggcatgagccactgtgcctggccccttcttcttgtaacttttcctggttacagaagtaatacgtacttatgatgaacaagttcgatgttgcagacacacattaggtagaaagagacggctgtactttgaagacctcccacccccaaaggccactagggatgaagggttcatggcactgagtcattttcagaagtgagatgggctgggcgcggtggctcatacctgtaatgccagcatgttgggagcccgaggcaggaagactgcttgaggccaggagtttgagaccagcctgggcaacatatggagaccctgtcattacaaaatattaaaaaattagccgggagtggtggtgtagacctgtagtcccagctatttgggaggctgaagtgggacaactgctcgagccctggggtgttgaagctgcagtgagctctgatcacgtcactgccctccagcctgggcaacggtgtgagatcctgtctgaaaaaaaatgggtttttttttttttttttttttgtggagacctccaatttattttacgtaatattttcttgtttagatatgctctaacttatttatccccaaaggacgtgcatttgggtcattttcaatcttctgctatggtaagtaacacttcagcaaataaatctttgctcatcactgtctctcttatataaactcctgggcatggaatttcaggtcaaagaatgtgcttgctctgaaatgtaatggattttgccaaattgctattcacagaagatatacccacttacactgccccaaagcctacatttttctcactttagtttggtcacattgtcctggttggatactttctgtctcccgtatctcatagttggagatatcctaaccatggcctcctggggacactgtgcagtttcctttctgctcatcctgctgcctccccccctaatccaaacaacccctcatatctgtgtatgtcagagggctgtccacacagcatctcatttgatcctatcttgtggggtaggaaggaaaaccgtatcagcacagtctggggtatgaggaccagaggtgaaacaactggcccagggtcctaggatggaaggagagcctccttgctgagcactttcccaccatacaccattgtccaaagatggcctcctaagtctgggaagggtagtaccaaggaggtatatcagttggaagtgatgccactaacacactaacacttactgaaaacactgatgtgggccagagactggggatatagaggtggacaaaacctcctccctgcctccagggagcatgcagagatgggagtgcaatgtggggtagttcctaggcagcatggggagccatctatataagctgagattggaagggtgaatgagggttggccagactaaggaatggcatttcaggagtgtacagtgtgggcctgcagagaggggctggcccgtaagcctggttcttacatgcagtcttgtctggctgggtaaggtagacatctacggtttgctctgccccacatccattctcccttctgggcacagcacctggactttcctttgggtaactagcccatccccaccttcctgcagtcacagggcatgtgactgcaggtgaccaattgcagtattgttcagggatgggcatggggccagcaggccaatgagactcaacctggggacttgtacaagatgatgggaaaaacactctccttccatgggctgctgaggatctccatgagaaaaagcccacctgagagggaagccaactcagatgaaatagggactaggcattgagagagacctagcccgagtgagatgactgagtccctgcatccagcccggccttagggtctaccctggaatttcagttatgtgagcctatcaattctggtttttgcttaaatcagattgactaaggttttggttatctgtaagcaagaatccagactaatgcaatgggataagaggaaaaggggaaaggagagagcagtagggccagctcatgaacctagctggagctaggctatggagttaaagacttgtccaaccactagaactaggaagattctgacttccacgtgagaactttgctctgctgagagagacagacagagaaggagggagggaaagggaaagtcaatgacttttctagaaatttcagagctgttgggacactttttggggattttctcatcaggatagagaatccggtctggaatcagccctcagccctgaaggtacgtgttgattgatcttaatttctgaaaatacactcatgcctttcagaccaggcttctctctgtcaccaagaaaagggatcttagcagagatgaatcagagggaattcggtccttcgtaaatgccagctctggctgaaagagaacacctgcattccagcagggcgctgccagggatgaatgggctcacctgttcccctcagccctgcaggcagtctttccacagggtcctgggagacagtgcactggcagatgggctgttgctggctccagaaactctccttttccaagccaggagagagaaagcccagggagaaaagtctcccttccggacctcaggagcctcctcattacactgtctcatttcctctggagagtgacggacataattggatcaaatggaaatgtaagccagcctccttccccctcccggatgagatacttccaatatggcttcattaccaagtctattgtaaataactgtggagaaaaatgccatttgttctgccataattgcctgatgagcatcagtagatgggtctttgaaacacatagaatgaaatcattttgggctggtttagaaattcctttgtgcaaatctttctccattcactgttctccatggtgggggttctgaagagggtcttctagagcaaggagccagttaggagcttggaggctgattctggccagggacacacttacttggagtattcagccaatatttgttaactgctgtcaactaaagaaaaaaaacgaagcttttaaagaattaaagttagttttatttagaagtcttcttgaggattatagaccaaggcctgtagcctgggaggaggctkttagaaaggttctctcagactcctccaacgtagtattttagtttatacataggtggtgaagatttagtatgtgaaaaattacatcaaggtttgggtgttagagtacatctggttatagattacagaaacatagtcactattcttgtcgggtgttattttatgagtagagaaaggcgaggactagggtcatttatctttgatggaattagtgactcaggcgagagacatggggggccatgcgttctatcctgttttgcctttaaaacatttttccagagagctgcacagtgtcccggagtcaggggctttgtgaaattctcccagcaaagggaaatgggcaaacacggcctcttacatttgccactttgtttcacgaagtttttggtcataaattgtttggttgtgttggtaakaattaatrttgattgccatctgtagttagaagggctcttgtttaggaaggttggtaatttttagttgtagttgtatcagacctagtgtgttttttagccttttcttggaaaatatgttttggactgagtttagttctcattagtaggatgcagggggtttttgatggtgtcttttttttgtatttaatacaatattttaataggattattatgaggatattatagattctatacagtaatacagacttcatagtaataaagtctgttgtagactggaaaaaatatgatatttaataaaattggaatatatatttgtatacttttaattgtattattttttatacttatatttrttggagtcttttttatgaaaagcaatgttggactagaatttattgtaaatgcctttatagaagaatttagaataataattctaaataagtgagaaaaatagaataatcccagttaaaatttgataaaggtttttgatttttttttttttttgacatggagtctcgctttgtcgcccagattagagtgcagtggcacgatctcggctcactgcaacctctgcctcccagcttcaagcaattctcctgtctccacctcctgagtagctggaattacaggcatgtaccaccacgcctggctaatttttgtatttttagtaaagatggggtttcacaatgttggccaggctggtcttgaatttagttattttattatatgtagtattttaacatgataaccagaattatggctgacagtgttatatcagaactactagacttttatacattttacatatttttagaatatttataagatatttatataaatataattttagaaaagatttaatmcaataataaaaattatgactcataaaaattggtctcatagtgtcttttctgtgttggaccaggctttaggtacttgggatatggcggtgagtgaaacacaaaaagatccctcccccackgactactctttgctgataagcttggaagcagcctcagaatgcatatcaacacccacctggggcagcccctaccaatggatcagagttggcctggcarggagtagaaacctatttgctgtgtctctctctctgtctctctctctccctttccccctccctctctccctccccactccttctctctctctctttctttccttctttttttttttttttttaatgagatggggtcgtgttgtgttgtccaggctggtctcaaactcctaggctcaagagatcctcccatctcggccaccattcctggccctatttgccacttccgacttagattgttattaattccattaactaagaaattgcagaatatccaagtaaactaggaataataccagaagaggcaaaaaaaaaaaaaaaatcccagaaagggtgaggcagaggtccataaaacatggcaggttttcagaacagtctgggtatgatttaaacaacaacaaaaatagcaggtcagagcgtgggctttggagtcaagcagacctgcgtttgggccccagttctgcttcttccggctgtgcgaggccttggtctgagctttgcttgccttcctggtgaaacgggtataataatgatacaactctcctaaggttgttgtgaggattaaacaagtcagcatgtatgaagggcttggcacactgtcctgttagctatgatcaggaccgaacttcacttgttacacgctggagtggatgcaccattgtttatagctggtatctgttctgactggatgtgcttgtgttatcacagttgttacatattttgaacattacccttatgtgaatattaattttatttagggggctggtctccttatgggagacaacttcagaactctggtggttaaaatagatataaactggccaggcacagtggctcacacctgtaatcccagcactttgaaaggccgaggtgggtggatcacctgaggtcagggggtcaagaccagcctggtcaacatgtcgaaaccctatctctacattagctgggcgtggtggtgggcgcctgtagtcccagctactcaggaggctgaggcaggagaatcacttgaacccaggaggtggaggctgcagtgagccaagatcgcactactgcactccagcctgggcagcagagtgaaactccatctcaaaaaaaaaaaaacaaaagaaaagaaaagaaaaaaaaaggatataaactgcttttcaaacctaaataacatcaaaagaattgtaggtttttttttttttttggctaatcaagaatttatgttctccagttctgaactactcaaccactgttgcagataataatattaatgtattgataataatctttaggataatttattaagaagcacctaataagcatggtctcacttaatcctctcaacaactctgtgaggattaacgtttcattaaacccactttatggaagtagaaaccaaggctcagtgaggtgaggattccttgcccaagatcacacagctggcaggacacggcagagctaggatctgatcgtggcactctggcaccaataccaaagccttaattcactgtgcctgacaatggtcctttgcactgaaagttgaggcccgatgagggggcatcagagttgtgtgttcacaggggtcagatcagtaatggtgctatctgtcccttgtgggctggggatatgccttagccaggggtctaagctgttagaagctgactctgacaggccacaagggcatgggacaagctaaccctcccctcagaaggtccaagctttcacttgagaacaagacagactcccacaaataaagtggagaatgtagccttggaagtttgggtgcttaattagttattagttaactagtaactcctttaccactactgtcagaaagcttccagagtccataggctggtcaagtaggttacagtaaatatttactcaccgaaactttaacaatttctaccaattattaattgctggtcatgttcccaggttgtatgctaagcactttctagacatgatctcatttaatcttcacgatagctctgtaagctaggtagtattattattcccttatttcagatgaggaaagaaagctcgggggggtgatctaacttgcccaaagtcagatagctcctgatgatggagctgggatctgaatccaggcctttgtaactttacaactggagcttatgctcactggtctttgtcaaactcctagagcaacaggtacaaagggaaaacttggggtgactgagaggactcctctaggcctacgtatcctgtttggccttcctagcttctctggcccactgcttatttgctggacatctcaatctcagacctgccatctgagtagaagcaagaccttattccaacatcttaagaagacacaaggcaaatgccagtcagagctgtggtgaggaccagcctttggcagctggagagtactccccttccctcccacacccccccaccccacaacaaagagtggcccatgagcccctgtcttcttcacctgatgggcagaagggctacagaaccctgaggcctccagtctttccaagctcaggcagaagctgagacacctactgggacaggcactcaggaggctgtgccaagaacggggcgtctggagagctggctcaccttgaaggagatttcatactgctcccctccccagatctccaagcctgggtcatacccgccgagttcccagaaccacttccgatccacggcgaacagtccaccggccatcacgggagacctgtcagagaagaagaacatggtgtgaaggtgcagatgtcctggccacatgctctcatgtggcccgataatgccattcccccagcggcggtgttccatgctgctccctgaacacagtccaagtgtcttccagggaatccaaggcccttccaggcatccccctttctttcctacaacttcctttcataagagctacattttaaccaaatgggacccgaagttcctttacacaattaacacctaagagtacttgtgaaatgaaatcacagtactttgtccacatgggccctgtagctgcatcataaatatgtacatgttagtcctctcactagttaaatggtccaagttgggggtctctccaagcctgtctgtgttgtagaatctcttagagagatgaaaaaatatacagctcgctgggccccacctcagacctgctgaaacaatccttgcgggaggcagcctagggctctgtgtttttgaacatgctcctttgacaactattactcagtaggccagcatggacgtttgttctgctgtggtgtttacagaagaagccactgtctctgtcttttcagttaaactgggagataagattaactccattcattcattctctaatgagtttgttcatcccatgccagttgtgagggaggtgctggaagaatctcgaggtcaatgagagtccttcaggagatgttggtgtagtggggcagccccctcaagacagagggtgcataagggactccgggaggtagagacagcattacaggaatctgaaaggagtgtgtctgtttccagcttttggggtaaggaggatggctggggcaagggtcaaggaatgaggctcaggggaggtggcatttaagtgggtttggacaagaggaaatttgggagagggaaaggcactgaggggaggataaaacgtcagcaaggacacagagacgacaaatcatgcagtacccacgggaacaggaagtccgcctggcaccgtgctaagtgaggaaacgtcatgctgctgactgtcagcgtcccccagggtatctcgcacaagactggcacctggtaggggccaaccagcgtttgctgtgtgaaaagctatcagagtggctgcatccttgtctggatgcactggaaaactccaaaccctcaaatccaaacattccagcagcaacctccattccccctcctggtccctggaagtgcaagctcatgggaagtaggctgatcgaataagctcttagtcaacccaaaagctgcccaagcagctcctccttccagtagcagatgagcctttacagcacaggcaggactcctttaaaaggggagcccctgaatatttactgagggcttgaatatgccgggtgctgtacggagctaatttattaataaaatgaatttactcttcacctcgacctcatgtggcaggcctcattatcatcaccattttacacatgtaaaactggagtgcagacagggaacttgctcaaggccccatggctaaaaagcagcactgctgggatgtgaatctctaatctaagccacagttcacacccctcgccaccacaatatactgcctccaggcaggcaggaacactcgagaagcaggtgatgcatgcaaagaacagggcgtgagaaattcggaaccctcactctcatttctgctttccttaacctgctgtgtgacctgagatgcagcgtttaaccattaaccctgtgctacccaggaaggaagccactggccacaggtgatgactctgcacttaaaatgtgactggtatgaactgacatgtgctgtgagtgtgagatacacaccagatttccaagacttaggatgaaaagagtatgaaagaactcattaataattttaaagtgttggttacatgttaaaacgataatatttgaggtatactggtttaaataagatacattattaagatgaattttacctgtttctctttaccttagaaaataatatcacatatgcagcttgtattatattggacagtgctgatttaacctctttgagccctattccccatctaaacaatggagtgatagctatacttcctatcccacgttgctagtgatacggttggctacgtccccacccaaatcttatcttgaactgtagttaccgtaatccccaggtgtcataggagagacctggtgggaggtaatggaatcatgggggcagttacccccatgctgctgttctcatgatagtgagtgagttctcatgagatctgatggttttataaggggctttttcctctttgctcagcacttctctctcctgccgccttgtgaagaaggatgtgtttgcttccccctctgccatgactgtaagtttcttgaggcctccccagccatgtggaactgtgagtcagttgaacttcttttctttataaattacccagtctcaggcagttctttatagcagtgtgagaatggattaatacagctagaatatttctaaaagtacccagtactataagaaaataaggtgttattagtattggctcccctttgtcttctggagattgagggggtcctggttttttttggctggagccacaaatctaccgcttggaaaggctgacagtgtttctgacttggtgcttcatgggagactgaactcaaggctttgcacatgaaaatcagcctcggtcaaagcaggggccggggctgaggggctgcatggaataggcaggatatcagctctaaggcatttgggatgctcgaggctttgcctccagagagaggcctctctgcccagcctgttctggtttctgctgtgtttggcaatactagtaacaattctgagtgtccagtgtgtgctacttactttactgacaccatctccagctctcacaaagctctaatattagtctcctttacagacggagatatttgaaaatcagaaatgttaaataatctgctcatagtgagtggataagctattactgaaagtggggtctgccactgaaaccatgtcttttaaacatccttgcaccatgctgtgcctgtagattgcccacttgctgggcactctaccatcaagtgggaaggtgggaagctgtacagaaaatgaccagaatttctctagtggccacttcctagggttctgtccaagtaaaaagcagaagagagacttctggaaggaatcatgggagaggatggagggcccttcagaaagcatctacaccagtgactgccaaccgtggccacacataagcatcacctgggagctttaaaaaatgatgatacctgcatcccacccccagactccagtgtaactgctcttgagggaagcctttgtgtttttacaagctccccaggtgatgtcaatgtgtggctagggtcaagagccagtgctctctggtgaggccaatcacttcaatatccagatgaggagactgaagccccagaagacactagctgggcctttgctactagccagctgtatgacctggtcttagcctttccttactgtgcaatgaggataacgatgggccaagacctgtccttaagtacctttcaatgagtctgctcattgcaaaggttcaaacaataaaggaggttctaattacccccttggttaccctgaaaattccattttctggagcagcctattctaacctcagcttctgcagtcatgtcaactaggacaagtcttgtttcctctctgaacctcaaggcctccatcagtcaaatgagggtaattctacctagacctgaggatcctacattattataaggatcatgcacaataatggtcagtagaaattgctttgccaacacaggccaaatgttagttactcctggtgttggtattattctacaaggatttaggtcaactgaggattgattctgaggtacacagaaggtggggcagactgcataatgtgatcatggctaaatcatatctttggaccaggaagggatctaatagtagtgatcaactgtgttcaagaggccaagagaagaccacaaatgtttgacctgctgctggagacatggaatccattcttgctctccactcttggctcaggctggtccattgtcctggccacctttcatttcctcaaagaacccaactctttctacctctgagcctgccctggggctcatagtgttaggggttcctctcaggagccctgggtatgcaccatgcccatgaagatggctgagcttccaacagtcctgcttctcagatggggagagtaaggcatagagaaatgtggttcactgaaggccaaactgtggtgagaggtacgactccccagttatggcagtgtctgaatctccggaacctgtgaatatgttaccttatgtggcaaaagagacttcgcagatgtgattaaggttaaggatcttgtggtggggaggtta

SEQ ID NO: 94191 - DNA, 18572 bp, Homo sapiens
  misc_feature (1)...(18572): n = A,T,C or G
gcctgttctataatcgataaaccccaatttacctcaccacctcttgcccagcctatatacctccatcttcagcaaactctggaaaggccgcagggtaagcacaagtatctacataaaaacgttaggtcaaggtgtagcccatgaggtggcaagaaatgggtacgttttctacacccagaaaaatctcaggacaacctttaagaaatctaagggctcaaggaggatttagcaataaattgagagcagagtgcttaattgaattaaggccatgagcacgcacacaccgcccatcaccctcctcaaatatattctagaaactagttgtacacccctctgtgatattgtccataatatccagggagggagagaatgatttgttttggttttgttttttttttttgagacagagccttgctctgtcgcacgggctggagtgcagtggtgtgatcttggctcattgcaagcttcgcctcccgggttcatgccattctcctgcctcagcctcctgagtagctgggactacaggtgcccaccaccgcacctggctaattttttgtgtttttagtagagacggggtttcaccgtgttagccaggatggtctcgatctcctgacctcgtgatccgcctgcctcgtcctcccaaagtgctgggattacaggtgtgagccactgcacccggccagagagaatgattttactccccatatcacaggggatttacattcccctgcattatttttcctaatatccaggggaaagatgaagatgttactccccatatagcatgggagaacaattccctgagatactgttcatatcatctctgggggggggggagagaatgatattactccttttatcacaggaagtatacacccttcttgagatattgtttataatatctagtgggggagaggatgatgttactacccatattgcagggggtgtacaaccccctaggatattgttcgtaatatccacggcgggaggagatgatgttactacccatatcgccggggtgtactgccccctgccatattgtttgtaatatccaggctgggaaaggatgatattacttcctatattacaggggacgtacatccccctgcgatattattcgtaatacccataggggagataatactacttccaatatcgtaaacaccctgtgtgtacaccctctgtgatgatgtttgtaatatccagggtgggagaggagtatattactccctataagtcagtgtgtgtatacacccctctgtgatactgttcataatatccactgggggagatgatattactcccaatatcataaacacctcacgtgtacaccgtctgtgatattgtttgtaatatccagtgggggagaggatgatactactttccacatcgcagggggtttaaacccctctgtgatatagtttgtaatatccaggggagagaggatgatattacacctcatatcacagggtgtgtacacccccctgtgatattgtttgtaatattgttcccaatatcttttccccccatggatattaggaacaatattgcatgggaagtgtacaccccccaccacattgggagcagtagtgttttctcctttgctggacattaggaacaataccacgggggggtgcacaccccctgtgatattgacagtaatatcatccactgtaccctaaatgctaggaacagtatcacaagggggatgtacacacttggcggtattgaaagtgatatgatcctctccccacctggatattaggaacaatatcacagaaggggtgtacaccccctgcgatattgacagtaatatcctctcccccaccccagatattaggaagaataccacggggtgggggtgtacaccccctgcgatattgggagtaatatcatccactagcccctaaatattaggaacaatatcacaaggcagggagtacacacactgcgattttgggagtaatgtcatcgttttcccgcccctgcatactaggaatatcacggggtgtacactcccatgcgctgttgggagtaatatcaccctttcttcccatggatattaggaacaatatcacagaagtggtgtacacacgctgcactgtatagaacaaagcaggcggaggaaggtgggataaccttgctggctgaggcttctggctctctttttttcttctttccgtgcaggacgcttgcttcccttcctcctgcccttggacatcagactccaggttcttacgcctttgaactgtgggacttgcaccagcggcttccccgaggctctcaggccctcggcctcagactgaagactgcactgtgggctttcctggttttgaggcttttggacttggactgagccactactagcttctctctttccctacctggcagacagcctgttgtgggactttgccttgtaactgtgtgagccaattctctctcgtaaactcccttatacatatacgtgtatcctggtggttctgtccctctggagaaccctgactaatagatttttattttttctccactgccctttcctcttcttctaggcttacctagaccaccaccattctttccccttttctaaagtaaaagttgtttttttcttgctaaatgcatggtattctgcccgttttccatggcttccttcagccctgctctgtttattcttgctctcttaagaggaaatccctgcctcttctgtggcttttccctcttggtctacgtactgctttctgttgttctcagaggcacactgagaccttttacatctcactgtcacttcttggaagggctctctctacctcgtctgcctgctaagcaacctcttggggagacacgggcactcttgagtcactgaacttgggctgtttggtgttggtatgttaatttatcttcttagaccacttaccacttccttaacttgaaaagagaagaataattattattttccatggttgatatgaagagtagaaataacttatacaaaatgcattgcagttaagtgatgataaatggccatgaatgcccttattaatgttattctatcagcctcagctcagataccatctgctctgtgagctctgctctgaatcatatctgcttcttctctgggttccttgtgctctgttcttaactactttaaagcagtaattgttctgattctaattagtgatccttcccaataaaattttaattttgtagatctcttccccccacccctgccccagcctaaccagtgttttcttattttttgtgtacaggctatatcactggtcttcttttatttgtggctaaataaatgttgtgttggaagagtaaagagttcccagttccatgggatcgatagttctacaaaatgaatataaacataatccatgtaaatatttcactttttagacaattttttaatttttaaatgtaatttgtgcatgtttgtatgttagtgagaccaaagatggtggcggcggggagcagggggcgtctcaccatgttgcccaggctggtcttgaactccccttcaactgctcccctcctcacctggcccccctcaccttgcctcctcccctctcactcctatgccagcccctgccattccccaccccctctgtagactgcaagactcaacaagtgacttgctgagcaaagcctgccgagaagaggtctgtttagggacacgggaggccaagtacacaaaaaggcaaaagaactagcatgcctttttcaatggatgtctgttttacagggctggcttcagattgttgttacagctttaagtaaaaggaccgttttgtcatctcggcccgtggcctacattatttctttgctgtccattgccctgggcgcttgactaataatttaacagcaatttttttttttttaaattttaaatcatgattcattgcattgctgtaagagtaatcagaggtaaagtggggcttgaaactgcctgtagttggttacttactgagatcttagcataattgtcaggtgagagggtgaagttttaagtagcgctaagtgggatagaaattcaatgcactgaaactgcagtgtccagttcagtaggcgctagccacctgtaagtgttgagcacttgaaatgctggctagtcctaactgagatgtgttgtgttaaatacactggattttgtcgttggagtaggaagaacagtgtaaaaatacctgcttgatgattttttatattgattacttgttaaaattattattactatgattactatttgggacatattaagtatacttaaaattaatttcaccttttttcttttaatggggcttactagtacatttaaaattacatatgcggctcacatatttattggacagcacagctctagtttaggaagaaataagaaaaatagaataggtaggggcagtaggaagtttgccctcttacaagactgattctaataaaaataatagatgatagttcttttttttttttttttttgagacggagtctcgctctgtcgcccaggctggagtgcagtggcgcgatctcggctcactgcaagctccgcctcccgggttcacgccattctcctgcctcagcctcccgagtagctgggactacaggcacccgctaccacgcccggctaattttttgtatttttagtagagacgggggtttcaccgtgttagccaggatggtctcgatctcctgacctcgtgatccgcccgcctcggcctcccaaagtgctgggattacaggcgtgagccaccgcgcccggccctagatgatagttctaattggctttttcctactagaaaaagcaagtgtactttacatgcctctttgttctccctctttccccttcagtttagtggttagcgtgtatttactatatcaggcttaatattcactaagcagtgttaagacgacttaggtaaatgattccctgatgaacacacttgattttcaaagcactttcctaacccgtttttaattggwatagagtcaaaggcagatggcttattagtagtcatttcatttaaatctcatggaattttcctgctaaatctcaaagtaaatttgttataggctgttttgtcaagtgtatggaagggacagcataggacatgtggtatttcatttccaaattgcttgagatgattttcattataatcatacattatttgcttctggttttccggaaaagccagctaaacctgtggttcatttagatataaatgaaatatcctcaaaggattgcacaaagtgacttatgcaacttgaatatatattttttctgtagggtgtttatcccaaattatctggccatttgctgcaatttgcagttttttagaaagcaccaaatatttttcaagttagagttgttttaataaaaacagtcattttgagttggcagcagccaaataaaatagccctttatttcacagttgagaatttgaaattggaaggtaattaacatatgtaaggatgatgtatttgctgcctggcttataggaatgagccaagttgttttttgagggatgttgttgctgtatatgtcccacctattttgcttgcttactgaacaatgcaagtttgagacagaaatatttgagaacacttttatcagttgcgacattgtgacattttgatagtgaacattttatatgttctgtcaacttagaatgtttgtatcttctgtcaacttaaaatgtttaattttgttattgccaaataatttggctataatgtttaatttatataaacattgtataatataaatgtttaaacattttgtgtcttctgtcaacttaaaatgtttaatttgttatagccaaataatttggctataattgataatttatcaaattaaattgctttttttccctttagactttcttcagtcacatctgaataaatcacttagaagtaagctagatttaatataatgaaatgcttaaaagagctgtgtgtcttcatattacacttacagtgattttcttttgtacccattatattctacctgcagctagttgaggtaaagagagggcgtttaactgtcaagggaaccgcagaggagactgtagaaatccggaaagtctctcggatctttgagcgattttgggatgcagagagtggggctgggatctctggctaggttggagccagcctgcatttgtctctctatcttggaagcaaacttagaatgtagagatagatgtggcctggatgctgctaactctagccaaccactaaatcttaaggtgggagagatgcaggctttggctgggtgctaagctgctgtagctggttgaatgtagaggtcactatcttttctgaatagttgtaggtaaattaaatcattctctactcccgtatgcctgtcaacctaatgggagatcgctatagaaaagatggtttaaattttagtctttgaagtggtttatgcacatttttggaatcaagatttaatgcmgacttggattggrtattgaatatttttgatttgtctacttttctctccatagggagcttayagcttcattgcacyrtgtgtgrcatttgggtcctgtttggcagcaatgactgcctttctgtttagtgtctgtgtgctatgaagattgcaaacggggtccagatgcattctgttttgagaatgtcaatggatacactagctgctgctttggatttcaccggttggtggtagttgacccgctgtttggaatgcagccaatttaagtgaagaaatatccatacacgtggctctgttacaatggtgaaatctacaaccataagaaggtaaggaaaaagaaaccagatgtctggatgcgattaaacttcagagcttgttggttacgatgatattatatattctgtatcatgctttttattttgcaaagcattctgtgttatctcatttgctctaagtatgtaggtagggaactgatcaataaaatggtgattgaaatgacttggtcacaaaaaaagtgataaaaatggggattacacagtttttttgactcttagaattttttctccttctccccagctttttgttttgaaaaaaattctaacatacagaaaagaacagaatagtgagcacctagattgaataatcattaatgttttgccatatttgcttgatttttctttctacacacacacacacacacacacacacacacattttttgccaaatcatttgagagtgtggtgcagattttgtgacacttctaaatatataagcatttatctcctaagaataaggacatttttctacataacatcaataccattattaaacctaagaatccataataccacctggccaggcgcggtgtcttacgcctgtaatcccagcactttgggaggccaaggtgggcagatcacgaggtcaggaggttgagaccatgctggctaacacggtgaaaccctgtctccactaaaaatacaaaaataaaaaaatcagccaggtgtggtggtgggcacctgtagtcccagctgctccggaggctgaggcaggagaatggcatgaacccgggaggtagagcttgcagtgagccaagattgagnnnnnnnnnnnnnnnnnnnnnnnnnnnnnnnnnnnnnnnnnnnnnnnnnnnnnnnnnnnnnnnnnnnnnnnnnnnnnnnnnnnnnnnnnnnnnnnnnnnnnnnnnnnnnnnnnnnnnnnnnnnnnnnnnnnnnnnnnnnnnnnnnnnnnnnnnnnnnnnnnnnnnnnnnnnnnnnnnnnnnnnnnnnnnnnnnnnnnnnnnnnnnnnnnnnnnnnnnnnnnnnnnnnnnnnnnnnnnnnnnnnnnnnnnnnnnnnnnnnnnnnnnnnnnnnnnnnnnnnnnnnnnnnnnnnnnnnnnnnnnnnnnnnnnnnnnnnnnnnnnnnnnnnnnnnnnnnnnnnnnnnnnnnnnnnnnnnnnnnnnnnnnnnnnnnnnnnnnnnnnnnnnnnnnnnnnnnnnnnnnnnnnnnnnnnnnnnnnnnnnnnnnnnnnnnnnnnnnnnnnnnnnnnnnnnnnnnnnnnnnnnnnnnnnnnnnnnnnnnnnnnnnnnnnnnnnnnnnnnnnnnnnnnnnnnnnntctcaaaggtgctaccaagaatatctttatggctggtttttgtttgttttgatccagatttcattcaagtttcatgcatttggttgtgatgtttcttggtatttttttgagactttttgatagatacctgtcatgcactgatagagatttatatcctatctatgttttggacatttttatctctgaataatagcttttgtcattgtttgttgcctgctcatgggaacactcttaataatagtcttcttgctcaaaaagttttgaaatagttattcaagaaattcctttcacacatttctttattcctttattaggggcctaatatgcaccagacatcatttttctaggtgatcgtagaagaaatggtgaaaaggaaaggcaagaatggaattgcctgctagtgggaagtagaagagagtattaaaacttttttctttytaagtcaaatcagtgtcatatacatgagaatgctaggcggtatgatggcattatcagcttggctttctccttaaataggaagtgccctgttttactcggacagtagtgtattttttttttttttgctaaaaagttacaagaagttaaatattttgaaaataattaatttccattctaaattagtattagtcaaatgttatatttgcaaaactagagaagtttgttctgttgcttctaccaagcgtctcagcttatgtagttggcgcagctataaatctaatgaacagaatgtatattgtaggcttatataaagtattctgcaacataagctcaaaaatacccccacccctttttgataaaaaataaagtttactactactaataaaatatagccagaggtgtgctggatgtggagggggactgagtgaaagaaagtaggaatgggatacaggctggggcaaagagcaggccctctccctgcaggggagtatcgggggcctggagccaagttaaatgacagcatgacttcaggaggccagattcgagggcttttatctaagatgcagctttggagtttggtttaagagagtaggaagtgatacatccgttacccaaaggacgcttctcttttttaaataaatcacctgcagagtttaggccaaagaggtgggcaagggagagttgggaaacttgcttgctaatatcaccaaatgtttttttttttttttttttacttggtggaggctgtaattggggcaaggacatttttatacaaaaatagagaaaacaatcgcctatggaatttgatccttgctccatgccctcgctagcacctctccacatgcttgatgatatttaaaatttcttcatagggaaaaagcttttcatcccacaattagaatcaggcttaacttgctttttgaagaggtagtatgtaatttgtgttaagatataaattactaagatttttatatctcgaaacagatttagatgatagagtgaggtaggtggtggtggttggtgggaaggggtagtttgttagagagggtattaagagttgggattttcaatgtgagagacgtgaaggtttgaaaataagtaagaaaagcactaaaaggatgaagtcaagggcctctgagagccaggatgatagattctatttcacagtttaacacaggatcaccatagaccaaagcaagtttataactaaggcagtgaagatcatctgtctcctcccttccccactaattgtgaccttagttttataagctcctaagaggcagaaaacaagttggagacccgtcatctattttggagtatatggcatgtatctattgtcctaggtgctgagtttatttttttcagctaatgacagttttccatgctttatggtcacttacccttcaggcagttcagcccaggacagtcagcagaagactgtttccagaccccacctgctagttacagatcatccctgatagagcagagagtggtgaccaggtagtggctttatagtcactggaggcaaagcccatttttggaccgttcattgagggcttacagacaaaaggttcacaaattatggagtgagccggatggagtgtgaagcgtatttatgggtcgtgcacatacataataggtttagtttttgagatttgaaaacatgttttaaacttaacctaggatttccacctgatttaaacctcttctttctctaatgtcagccaaaaatgtgagtatgacatacaaacagtaatacatcaaggacttttcatcctcatagtttgccagtgatggtggagagtgtcagaattggggagtatcctaatcaaaccttcttactctgcatgcagtggcagacagtccctttgctgttcctttgggacatgcagactaataaagcgccaccatcattttatctctcagtgaggggtagttttaatgctactgcagtggtggaagcactgggcgttgtcatccacccctgaggacaagcagctttgttttggatcatgtatctgttattgtgatggagccatttatttttcagggaatgatgccaaataatgtttgtccctttgctttgcatttttatagctaggtctttgaagctgaactggaggaacttcttagccaatactgtcttctcaaacccaaagtttacagttgcagaagacacattttttagtgtcatggcaaccaagcaacctattaccttaactttagaggttgagcatccctaatctgaaaatctgaaatttgaaatgctccaaaatctgaaactttttgagcactgacatgacactacgtgtggattttgatgtcccagtcaaaatgcaggtgtacaacacacagtttatttgacgttccgtagtgaaaaaagaccctctcagcccccttcagctgcagtataacttgtctacacgtgctcagatttccccatgcaagcacgcccacaaagggtcacagaatggcacatgtgcaagctggacacgccaatggcaggatccccacagatgggacataagtgcattacccgttgtgtatttttgcttattctctgctctgtggtgttaacatactgaaaatgtcaataaggcctgtagatatccctacgagcagcaatgataaggaaaagtagaaacgcttataacacagaaagtcaagctgttggagaaattggactgtagtgtaaaggtatggatgacatggtgaaaatgtgtgatagagatattcaagatattkaaggactagagctacctgcattcataacagaacaagaggtcacgtcagtttataaaattaaagagagacttccaagacaaaagccgttgatgatgaggcagatgactctggagaaacattataaaaagccatctggcagaatgccacctcagtctcagaggactcacctccttagttgctcagctcttctgatatttcttctcacctaaaaaaagaaaaaaaatacaatgtacagtaaccgtttaatcaaaacacaaccttgtaggtggagcctgaaagcctgccattgtttgtacagctgtttaacagctgatgcaggtattctggtgatgctactgtgttgcttattattttttactgtattaatggcatgtcatattttttacttctgtgtgaataagtgtgtgaaaatgattgctcatcagtagcatataaattcggagtcagaaatggtggtcagtgatgtcagacagccacagattttccacatggtagctgagatagtgacacctttgcttctgatggttccgtgtacacaaactttgtttcctgtacaaaattatttgaaatattatataaaattacctttaggctatgtgtataagatatatgaaacataagtgaayttcacgtttagacttgggtctcatccccaagatacctcacgtagatgcaaatattctaaaatccaaaaaaaattccaaaacccaaaatacttctggttccaaacatttcasagaagggatactcaatctgcgtatacataaatatttatgtatcacatacatagtatgtatataatatgcatttccattcctctacaggttgctattctggtacattcccattatattctgtttatcagactgcacctaaaactttcatgggttcagccttatgttgaacagaatttgcagaattatgagttgaagcaaaccctagttggataatgctatgattctcctaaatcaccaaagtgcatgaaataattttagagctccagaaatactgaagcaactttgcaataaaaaattattagtgaatgcacaaggagtctataacgttttggttttgctattgcttcctaaggtgcaacactattttgaatttgaataccagaccaaagtggatggtgagataatccttcrtctttatgacaaaggaggaattgagcaaacaatttgtgtgttggatggtgtgtttgcatttgttttactggattctgccaataagaaagtgttcctgggcagagatacatraggagtcagaccttcgtttaaagcagtgacagaagatggatttttggctgtrtgttcagaagctaaaggtaatagtaaatttatctatagattttcattattgtcttggtcgtgtgttttcttttaaattctatttgaaaatctcttagcaatccagaattttacaagtgactgagttatgagttcttaccttttttaaaaaaacagaggagttgtactctccttttcagcatttaaattctgtaatccttgaaggatgggtctttagtgtagtcatttattttttgctgtgctaatatgctctgcatctagcttgatcgcaagtgcagttttaagttttcctgtgtcatactgtaatggtagggctggctgtgcaattattgccatgtggtactttgccacagtaacagcacagcaaatactaggatttctaaaacagctttattggtaattgacataccatgtaattcacccacttgaagtatacaggtcagtggttttagcatattcacagatgttggtaaccagcattccaatcaattctagaattgtttctccacctcaaaaaaaaccaaatcaaatcctatgccctttaccttattttatttttatttatttatttttttaagagatggggtcttgctcagtcaaccagcccaggctggagtacagtggtgtaatcatacttagtgcagccttgaactcctgggctcaaatgatcctcccacctcagcctccctagtagctatacgagtacaggcatggaccacaacaccctgcctcctgtgccctttagctttcaattccatctctccacatccctcatctgcacccccgcagttgtagcgctggaaatcaccaatctttctgtctctggattccctattgcgtgtgtttcatataaatgggattatatatcatacgggcttttgttactggattctttcacttggcataatgcttgcaagatttgtctatgctataacatgtatcagtacttactttttatggccgaatgatagtctgttacatggatacactggattttgtttatccacttgtcagttgatggacatttaggacattgctaaccccttttggccattacgaataatgctgctataaacattggtgtacaagtttttgtgtagacatttctctttggtgtatatctggagcagaattgctcggatgcgtgataactgtctaattgaggaactgccaaactactttttgaaatggctgcattattttttattccctccagcggtgtattaaaatttcagtttctccacatcttcacaagcactgtgactttttaattgtagccattgtaatgtatgtgaaattgtatctcactgtggttttgatttgtattttcacggtgacagtaatgtccagtgtcttattgcatgcttattggccatgtgtatatcttctttggagaaatatttgttgagatcttttgccattttttttcctgctagggatcattttattttaaaaacatagtagactcttttttcctagcagttttagaaaaaatagaaaagtgcagagagttcacatatgctcccctacaatgcccccgcccagtcttcccgactcttaacatcttgcgttactgtgctacatttattagatttgatgaactgatacttatatctgaagttcatagtttacattagggttcactctgtgtttcataaatttttggatttgacaaatgtataatgtcatgtacccaccattacagtattatgtagaacaatttcattgccctaaaaatctcctgtgctccactgattcgttcctcctcctcctctttctcctacccccggtcattactgatcttttcactctctctaattttgcctctcccagaatgtcatgtaatagatcatgtagtatgtatccttttcagactggcttctttcacctagcagtatacatttagggttcttctgtgtttttttcatggcttgatagcttatttttcaaattgctgaataatattccatttgtttgcatgtattgcagtttgtttatccattcttgaattatccatctctaattgggttgtttcgtctttttatttactgaattgtaattcttccatatgtattctagatacaaatcccttgtgttcatcagggttgcaggatacaagatcaatatacaaaaatcaatagtatttgacacactttaactgagtactacatactcacaatgagcaatcagaaaatgaaattaagaaagcaacttcatttatcatagcatcaacaagaataaaatacttactaataaatttaagaagtgtaaaacttgtactctgaaaactataaaacattgtcgaaagaagtgaaagaagatctaaataaatgtaaaagtatcccatgatcatggaccgaaggcttaacatttaagatggcagtcctccgtaaactcatctacagatttaacttcatccctgtcagaatcccagatgagttctttgtaaaatcgacaagctgactctcaaattcatatggaattgtaagggactgagaatagccaaaataatcttttgaaaatgaggaacagtgtaggagaactcatacttactgactttataacttactacaagacaatggtaataaggacaatataatactggcagaagggtagatgtatagaccagtgggatagaattgacagtcagatatgaacccatacatatataaccaactgatttttgacaggggtgccaagattattcagtggggaaagaagtttgaaaactggcccagggacaactagatatgtaaacatatgcaaaacctggagtaggacctttacccaacaccatgtacaaaaacgatgcaaaaaaaaaaatggatcaaatggatccattttgagtgaatccacataaatgtaaggactaaaactataaaatcctgagaagcaaacaggagtaagttgtcatgaccttggatttggcaaagttttcttaaatatgagaccagcaacaagaataaaaattgatgaattggacttcatcaaaattaaacatttttgcacttcaaaggacaccatcaagaaactgaaaagacaacccacaagatggaagaaaatacttgcaaatcatgtatagcactttttgatggtaaacttgaggaagacttttttttttattttttatttttattatactttaagttctagggtacatgggcacaatgtgcaggtttgttacatatgtatacatgtgccatgttggtgtgctgcactcattaactcatcatttacattaggaatatttcctaatgctatccctcccccctccccccaccccatgacaggccccggtgtgtgatgttccccttcctgtgtccacgtgttctcattgttcagttcccacctatgagtgagaacatggtggtgtttggttttctgtccttgcgatagtttgctcagaatgatggtttccagcttcatccatgtccctacaaaggacatgaactcatccttttttatggctgcatagtattccatggtgtatatgtgccacattttctgaatccagtctatcattgatggacatttgggttggttccaagtctttgctattgtgaatagagctgcaataaacatacgtgtgcatgtgtctttatagcaacatgatttataatcctttgggtatatacccagtaatgggatggctgggtcaaatatttctagttctagatccttgaggtattgccacgctggaggaagacatttattttttatctcttaccaacacagcagtaacatcctaaaatctctcttcctgtctctttttgccattctttaaatcttttctcacttaattttcagatttaatatttaatacatggcaacactccctgtagtcccagctatgggggggagactgaggcaagaggatggcttgagcccaggagatggaggttagattagaaagcagggataatgagatcaatcaaagcggtcctcaggacactagtcacagtgtttgtactaatactggaactggtttattttcaggcatttctagtgtgatcagatggcaaagaacaagtatatatatgtgtgtgtgtgtatatgtgtgtgtgtgtgtgtgtgtgtgtgtgtgtgtatgtcagtttccaggactgctgggcaagcctgggaaagacagtacctggggaaagcagcctcctgctcccctgtgccttctttgagcttgatgatcatttgatgtggtactatataatcacatccaggttaccctctgaaattccttgatggttcttttctatatccttgacactgtccttttacagaccaagtgatcttatctggaatattacaacagttttcttttctcagtgcttttagaataacctgtcaaaaactcatctgactatagtagtacctgcttacaaccttttacttagtccccatttcctaccgggctgtgtagctcacttgagctctgctaggtggtgagggaatctgggtcctctttctggtatttgaattcagtgctacacaggttactggctgggttgacaatctcaaattgtaaatcatgagtattctatgtagatagtctgtcacgatttacaatagaacattgacatttatgtaaaagatcatggtgatgtgaggttgcgtactgtctgtgagaattaattgaggaaatttaaattatatggttttattcacatatagtgcataacaactagttaagggatagatgtcttcttatctgactttcaagtatctaagagtggatcattgtgcttgttaaagttctgggaaccatggctattttctgaaaatacctcagtgatgacaaataaatgactaccagcctctcgtaacattaggactccagttcatccctttgcttcataagtgtgtcttttccttttgtatgtatttgcattagtatagaaaataggttttcttgattagaaatctaagaagaataaattgaaaactggagatttttctattgctttggattactaaaagttagtgtaatttggcagtatatccttgtgccattattgtctctctggtaagtagatggtagggctttgggtgattaaaattttttcctattttgcttatttaatgggcatgtgtttgtattaaaaaggggaaaataaataggaaggtagaagatgttaactaatcgtgaaagttattgggaagggttacctaatttaaaagttggccagccatggcaacactgcctgtagtcccagctgtggggggaggctgaggcaagaggatggcttgagcccaggggatggaggttacagtgagctgtgattgtgccactgcacttcagcctgagggacagagccggaccctgtctcagaaaaacctagaacaacaacaaacagagagaggagcctggacgraytgagctacgttagtgttcgcgggctgctgtagtgatggcttacaacatcagaaatttattctcttacagttctggaggccacaagtccaaaatcaaggtgtgggcagaaatgcgctccctctgcagactcttggggaggatccttgcttcttccaggtctgcgactgtggttcctgcagccactggaaccagctctgcacagctcagacctgagtgatgaggacacagcttcgcaggtgggcagccacatccccagggggagcctgtgggcctgtggcagggttggggcaggcagggcacgggctccccatagtccccattgttgcccctgagctcctggggcttgtggagaaagacgggtggaggcgcacataaatgcagctccctggatctgagccttggtttccctacctgtgaaatgggcacccatggcagctcagaagtgtctgggagcatcccctgttggggaaggtagtgggggaggctgctggggcacagtcatgggggaccccagtccccctctccatgtgcttccctcaatgctccctgatgccagcagacctgtccctgaaaagagaggggcattcctgtgagttccttgtgtggaggatgggtcacagagactctccaaatgcagggcagggtggagg

SEQ ID NO: 94192 - DNA, 13707 bp, Homo sapiens
  misc_feature (1)...(13707): n = A,T,C or G
gcctgtccagggactctgcattgctgctgcagagagggatgtactcggatgtggcccagagctgcccacctcccaggtacccgctggcatggccggcccacagggcatccccccccaccccctcaacaggcatggctgaggcgggcaggctcattgggggtacataagaactctgcctgggctgggcgtggtggctcatgcctgtaatcccagtactttgggaggccgaggcaggtggatcatttgaggtcaggagtttgagaccagcctggccaacatggtgaagacccgtctctactaaaaattaaaaaaaaaaaattacctgggtgcggtggtgggtgcctgtaatcccagctactagggaggctgaggcaggagaatggcttgaacccgggaggtggagattgcaatgagctatcgtgccactgcactccagtctgggtgacagagtgagactccacctcaaaaaaaaaaaaccctgcctcctgcctgcagctgggccacaggacacacagacccaagtgctcagcctggcacagggcctcagatcatcactgtccacacagcaaggacagaggaacagcaaacaaggacaagggaaggaggagaggcgctatcttggggccatgctcatcctgctgtgtggacaggcactggctgggccaggctctgtcccctaggggactcaaggtgggcctgtgaaaggcaggtgagaccccaaaatggaccacgttcccttgcaacccggcacactctctgggcagccaaatcgctgccatgctgaaggctgggtgcccaaggagacgtgagggcggcgtgtgggtggaggcgagaccagaccaggttgtgcgcacacaccgagggtgaggtccccagacaggaccaggctgaagggctcagggagagaggcagagggctcagccaggacctgattctcctgcagtgacagcaggcccagcacagtgcctcggcctggcctctctggctgtcagagtgccggatgggggaccctgcgctgggagccttattggaaccccattcattcttgctgtggcccctcctgggtccccaagacagaaacctccggcatctggcaaacaccagagaggaaagtgctgccacctgtctgggctgccgtgagcctgcccagggtaagggggagcccctaaagtctgcaagggggaaatcaacgggaggaagacacaggcctaggctgtgtggcatctacatgcactgcacatgctggaccggcactcaggcgcctgccaacttctccgtcagtttacaacctcaagtgggcagggggccgtgactggccatggagccctgggaggggcagcctctggggaggctcaatatggccgagtgccctgctggggggttgggggggcatcaacgtggcgcctgcccagtctgttctgagaggctcagatgcagagcctggtgtgaagatgccatgagacaagacacaggtccggcagaaggcacttgtggccactgcccaggagacaccgagctggctgtggtggcctcagcaccatgtttcaggtctccctgggaagctctcaggggtcagcaccttggccctgcaggtcatggcccactcacatggggagcaactcagaaccacagtcactgtctgtgcagggcagagcccccgggggcaagagggaaagctccgcaaacggcaggaccgcctctttgtagcttcctgcagcggcacagtctgtccaccgcgctccggagttccacaggaaatggaacgctccacagatgccagttacgcccgaaaacgacacagaacacaggtgcggacagggaacggcatcctcagagcatggtcaggggagaaaagcaagctggaaggagagatgattccatctgtataaaatccaggaaacgaaggacgctcaccgccatgcgcctcggtgtgaggagggaggcgtgtgtgagagggaggggatgtgtgtgagagggagggggcgtgtgtgagagggaggggcgtgtgtgagagggaaggggcgtgtgtgagagggaggggcgtgtgtgagagggagggggtgtgtgtgagaccgagggggcgtgtaagggagggggtgtgtgtgagagggaagcgtgtgcacacaccagccctaaccatgatcactctctggccaccaagatttggaacagcaacttctgtcacatttgaatgtttttaaagcaggtgccactttgttgccataaaccaaaccgtagtctgtctttgaaggtggcatctccagcgtgggaacactgattcccacctgggcactcctccccgtgcacccgtgacacccacagccaggaggacagtgtccgtgtgcacacacagggggcagtnnnnnnnnnnnnnnnnnnnngtgtccgtgtgcacacacagggggcagtggaaggagggagcccagcccgacacgtgacagctctcctgggcccagagaacagtgtggcagcatttaaagcagcaaagagacccgccgtctgcacctgacggggaaaacgcgctgtgcctctcctcagagacagacaggtctgcctgtttccatgccaccatcaggggannnnnnnnnnnnnnnnnnnnnnnnnnnnnnnnnnnnnnnnnnnnnnnnnnnnnnnnnnnnnnnnnnnnnnnnnnnnnnnnnnnnnnnnnnnnnnnnnnnnnnnnnnnnnnnnnnnnnnnnnnnnnnnnnnnnnnnnnnnnnnnnnnnnnnnnnnnnnnnnnnnnnnnnnnnnnnnnnnnnnnnnnnnnnnnnnnnnnnnnnnnnnnnnnnnnnnnnnnnnnnnnnnnnnnnnnnnnnnnnnnnnnnnnnnnnnnnnnnnnnnnnnnnnnnnnnnnnnnnnnnnnnnnnnnnnnnnnnnnnnnnnnnnnnnnnnnnnnnnnnnnnnnnnnnnnnnnnnnnnnnnnnnnnnnnnnnnnnnnnnnnnnnnnnnnnnnnnnnnnnnnnnnnnnnnnnnnnnnnnnnnnnnnnnnnnnnnnnnnnnnnnnnnnnnnnnnnnnnnnnnnnnnnnnnnnnnnnnnnnnnnnnnnnnnnnnnnnnnnnnnnnnnnnnnnnnnnnnnnnnnnnnnnnnnnnnnnnnnnnnnnnnnnnnnnnnnnnnnnnnnnnnnnnnnnnnnnnnnnnnnnnnnnnnnnnnnnnnnnnnnnnnnnnnnnnnnnnnnnnnnnnnnnnnnnnnnnnnnnnnnnnnnnnnnnnnnnnnnnnnnnnnnnnnnnnnnnnnnnnnnnnnnnnnnnnnnnnnnnnnnnnnnnnnnnnnnnnnnnnnnnnnnnnnnnnnnnnnnnnnnnnnnnnnnnnnnnnnnnnnnnnnnnnnnnnnnnnnnnnnnnnnnnnnnnnnnnnnnnnnnnnnnnnnnnnnnnnnnnnnnnnnnnnnnnnnnnnnnnnnnnnnnnnnnnnnnnnnnnnnnnnnnnnnnnnnnnnnnnnnnnnnnnnnnnnnnnnnnnnnnnnnnnnnnnnnnnnnnnnnnnnnnnnnnnnnnnnnnnnnnnnnnnnnnnnnnnnnnnnnnnnnnnnnnnnnnnnnnnnnnnnnnnnnnnnnnnnnnnnnnnnnnnnnnnnnnnnnnnnnnnnnnnnnnnnnnnnnnnnnnnnnnnnnnnnnnnnnnnnnnnnnnnnnnnnnnnnnnnnnnnnnnnnnnnnnnnnnnnnnnnnnnnnnnnnnnnnnnnnnnnnnnnnnnnnnnnnnnnnnnnnnnnnnnnnnnnnnnnnnnnnnnnnnnnnnnnnnnnnnnnnnnnnnnnnnnnnnnnnnnnnnnnnnnnnnnnnnnnnnnnnnnnnnnnnnnnnnnnnnnnnnnnnnnnnnnnnnnnnnnnnnnnnnnnnnnnnnnnnnnnnnnnnnnnnnnnnnnnnnnnnnnnnnnnnnnnnnnnnnnnnnnnnnnnnnnnnnnnnnnnnnnnnnnnnnnnnnnnnnnnnnnnnnnnnnnnnnnnnnnnnnnnnnnnnnnnnnnnnnnnnnnnnnnnnnnnnnnnnnnnnnnnnnnnnnnnnnnnnnnnnnnnnnnnnnnnnnnnnnnnnnnnnnnnnnnnnnnnnnnnnnnnnnnnnnnnnnnnnnnnnnnnnnnnnnnnnnnnnnnnnnnnnnnnnnnnnnnnnnnnnnnnnnnnnnnnnnnnnnnnnnnnnnnnnnnnnnnnnnnnnnnnnnnnnnnnnnnnnnnnnnnnnnnnnnnnnnnnnnnnnnnnnnnnnnnnnnnnnnnnnnnnnnnnnnnnnnnnnnnnnnnnnnnnnnnnnnnnnnnnnnnnnnnnnnnnnnnnnnnnnnnnnnnnnnnnnnnnnnnnnnnnnnnnnnnnnnnnnnnnnnnnnnnnnnnnnnnnnnnnnnnnnnnnnnnnnnnnnnnnnnnnnnnnnnnnnnnnnnnnnnnnnnnnnnnnnnnnnnnnnnnnnnnnnnnnnnnnnnnnnnnnnnnnnnnnnnnnnnnnnnnnnnnnnnnnnnnnnnnnnnnnnnnnnnnnnnnnnnnnnnnnnnnnnnnnnnnnnnnnnnnnnnnnnnnnnnnnnnnnnnnnnnnnnnnnnnnnnnnnnnnnnnnnnnnnnnnnnnnnnnnnnnnnnnnnnnnnnnnnnnnnnnnnnnnnnnnnnnnnnnnnnnnnnnnnnnnnnnnnnnnnnnnnnnnnnnnnnnnnnnnnnnnnnnnnnnnnnnnnnnnnnnnnnnnnnnnnnnnnnnnnnnnnnnnnnnnnnnnnnnnnnnnnnnnncaggggcgtgtgtgagagggagggggcgtgtgtgagagggaggggcgtgtgtgagagggaaggggcgtgtgagagggaggggcgtgtgtgagagggaggggcgtgtgtgagagggaggggcgtgtgtgagagggagggggtgtgtgtgagaccgagggggcgtgtaagggagggggtgtgtgtgagagggaagcgtgtgcacacaccagccctaaccatgatcactctctggccaccaagatttggaacagcaacttctgtcacatttgaatgtttttaaagcaggtgccactttgttgccataaaccaaaccgtagtctgtctttgaaggtggcatctccagcgtgggaacactgattcccacctgggcactcctccccgtgcacccgtgacacccacagccaggaggacagtgtccgtgtgcacacacagggggcagtggaaggagggagcccagcccgacacgtgacagctctcctgggcccagagaacagtgtggcagcatttaaagcagcaaagagacccgccgtctgcacctgacggggaaaacgcgctgtgcctctcctcagagacagacaggtctgcctgtttccatgccaccatcaggggagtgagcacggggaataatcagccaggcagcctcactcagcctcacctcggctccggagatcgttctggagctgagtggtgacgtcagcagcagggctgagcacaaacaacaaggccaggcgccaagacgaccaggcgagggcggcccgggggacagcaccactgcacggtgccctgaagggggagcaggtgccacggcacttccccgagaccgcatgcgggggctgcagctggaatgggacctgcaccccactcaggtctgcctgaagggctgtcagtcaagaaggaagacgggacccagcaaacagaagccacgacctcccagcggccctggacacacatgaccaacgcaccagcagtaaacaaaagggcctgcaagggtcacccccggggccacccctcccagcaggtggtgatggatggcccgcagctgtgcacagtggggcagtcctgcttaggttcagcagcaggttcccagcagacagaaacgctctggtggccctggaggccgtggtgggcagagaacaaatccaggcggcccctcccctctatgcctaaccccagcatctgcagggaatcacccactgtcttcaacctcagggaggaagccccgacacaatctgacttgcaaagaggctccccagcgaagctcccagcaccgcccttgcggctgcctgcacttccgccatgcaccctggattccgagggtgagcccgctaatgcacaaagctgggactaacttgagggacagacaccagacggcagaggccgggctggcaccgtgcctgctccccattggtagtctcctggtgctcagtcctctccagcaggagccttccaaccccgcatttgtgactcttcctcatcctactgaagtaacaaccccgtcaccgcagatccctcctgaggcacacgctgctgacagccagrcgctggcccttctgctgggagtgrtgcccatgcagcggaacggtcacaagcaggccaggacgatctgccagaagcccgcctcaccgcaggcctgtgacggcgtcaggctgagtctgcaccgagcccagccccactaccttctccaaagctggtctgtctcagagccaaggacaaagcctcaccccacggttcacaagcagcaccccttgacaggaaagttggccgggtgtggtggctcatgccttgaacagtcctttggaggctgcagtgggaggactgcttgaggtcagcagttcgtgaccagcctgggcaacatggtgagacggtctccacacaaaaaactttagaatattaaaaataaataaaaacagaggagaaagttgcacagcaaacctcacttcctgtgcacagatggacaggagtgcttctggccacaacaacaaaaggttaattccaacccggagggttccaagccgtaaccaacacaagagagacgcgcccagaccaacagcctcaagcaaaatggcaccttcgaccctgggctctgcccggtgcccgagagcacctgccagcctgtttgattcctgatatccacagacatgcaccaaacacaggtctgagtggccaggaccacagcacaagtgggtgcccctcacggcagagacctccagtcgagactcacctgccttctgctccaagggcccggcaccctgagatcctgatgccagggtaagctggggggctgctcatggtcgaggacacgggtgggtgctcctgaacagcagagtggccccaggggtggatgcgtgggggctcaggcgcaggcagccgtgggggacatcaccacctcagacccacagcagtcccctagggcagctcaggagctccggccacctgaactggcccttccatgggcaggaccactcctgtgggcagcacagtgggtgcagagccgggkggctggggtgagacccttggctggcagaagctgcctgccaaatgtcagcagaggcacagcagctaggaggcccttgragycyccaccgtactgagggaacagcactcactgccgtcctcagaggccaaggccacaggcataagaggatcacccagctgggggcttgtgtatgcctgatattaatagcgctggctttgcctggtgtggccctgacaatcctcgggccagccctcggtgtgaactgccccctcctgtgtgtgggctggcacattcggccagcctaggaccgcaggcctgcggaggaccactgtgcgccgtgtgcctgcacccctcctggatcccctggaaaaagctacagtaccccggcctgcctggggctacagagtgaaccccccgcagcaggacaaggatatctgaggcgcctcttggccaggtgtcctgaacgtcagtgctgagctgggcaccccatccctagccccagagtgcttccgacaggcataaacaaatctgaaactccaccctctggcaccatctgaaaataactgccttgccctacccccactcacgggggatcctgcagggacctgcagccacccagggctcaccacccagggctcagcagagcacaggggacacagccacctccccgcccagggctcagcagggcacaggggacacagccacctccccgcccagggctcagcagggcacaggggacacagccacctccccgcccagggctcagcagggcacaggggacacagccacctccccgcccacagaaacagggtttcggccccaccctccgcagagtcagtcaaggatgtgcacagagaagtcctggcagccctaagctctctcccaggggcagacaggtcagccatgggtgtcagcttcctcctaccatgggtttctcttggagcttctagtactgaggcaggggctgccagaagctcagggaaaagggaagactccacatggaggtcatactcctcaatagtaggccactcctgggagctgcctcagaggcaggaccggcccatctgtctgtgtccacaggtgcttcctctcctcattctgctcccaggaggcggctacatccctcacttgggaagtgggcaggagacagcccagggtcggggaggcggaggctgtcctgagcaggggcgcagagtccgggctcctgggggccatgccactggctgggctgtctgaacagcagagtggacgcagactggtcttgcctggcatgggcatgcaccctggctgccctagccggccaagaggcaaggctacaggcctggggaagccagcactgtgctggccaggcgagggacggaggagcccaggcacgcagctgtgaatggaaccaccaggccccaccctggaatcacgtcgcctcgctgcaggccacgtggtccccaacatgcccctccacggggctgctctcggccacagcagcccacggcagggaggggccgctcacggtggggaggggtagcctgccctggtcctattcactggtgttcctcccaggttctaacttcctgagctgggccggtccagagaactcccattcccacgccacccacaggtgctgatgccgcgctggggtaagcgctgcccagagcaccttctgcctaaggcttcctccttgcaggtggggctgtctgaggcccgtggtgctggaggctgcctcagtcacttcagggcaccccttgcccttccctcaccttcagccatcctactctgggccacagcacagtcgaatgtggctcagtcccctccacggagccacagcttgcctcagtttcctcctcaaggactaacagcaggttcattacaggtgggtcagctcataaagtccaaggcagatgcctcatcggtgatcaggccccataactgatgtcatcgtcaagaaataggcacaggtggccgggcgcggtggctcacgcctgtcatcccagcactgtgggaggccgaggcgggcggatcacccaaggtcggagtttgagaccagcctcaacgtggagaaaccttatctctactagaaatacaaaattagctgggcacggtggcacatgcctgtaatcccagcactttgggaggccaaggcaggtggatcacctgaggttgggcgtttgagaccagcctgaccaacatggagaaaccctgtctctactaaaaacacaaaattagccgggcgtagtggcacatgcctgtaatcccagctacttgggaggctgaggcaggagaattgcttgaacccgggaggcagaggttgctgtgagctgagattgcgccactgcaatccagcctgggcaacaagagcaaaactccatctcaaaaacaaaacaaaacaaaacaaaagaaatacacacaggcagccgggtgcagtggctcacgcctgtaatcccagcactttcagaggctgagcgggcagatcatctgaggtcaggagttcaagaccagcctggccaacatggtgaaaccccgtctctactaaaaatacaaaaaattagctgggcgtggtggcgggcgcctgtagtcccagctactcgggaggctgaggcaggagaactgcttgaacccgggaggcggaggttgcagtgagccgagatggtgccattgcactccagcccaggactctatctccaaaaaaaaaagaaaggaagaaaaataagcacaggcatgtgtggagacctggaggcagggctgcccctcacgaaccatccacaatgccaaggaaaccagaagcaaacgtccagcagcagggagcgcagggcatgtgaaaccgacactgaggaaacagccacgggagagagcacacagggagaaaggaaggctcgggcactcccttgctgtggttcaggcctgttctaccacccctggggtcaccatcgcccacggaccttcctgctgggtgcctgtagcacggcacctcctgacaggtcaggtttaagggaagtttgctggataactaaaatgaggctggggggaggagggagcagggaggagctagcccacaggagccaatgcaggcctgaccccactggtgccggactgactcagggagagtcattagggctgctttctcaggctggatgagcactgggggttgggggcttgccctggcccaccccaccactcaggaaaccttccctcagcaggacctgccctgcacagatcatgggcagcctccctctgctccccacttccacagccccagactccatctcaaccgcagccaggagtcactgctaacaccacaaaggacctgttcctgcaccagcacgggccagctctgggggcaggtgcccaggacagagtcacgagtggcaagcagacaataaacaacaggcaagatggacagactgattgccgggaggatgtggcaggaggcactggaacggtggtggaggaaccccagccctggggacagacctccacccgtgcacagacctccaagctggagcctgctctggaacactaagggcagcagcagaggttgaagaggggcagacgcaggaacgttggggacacgctcggggaacagtgagaaaagccctaggctggggcagaggaagtcctcgatggcacaagcatcaggacacaaagtgcaagaaatgtgcctaagacaagaggcagttccagggcagaccggggcccctggagaagggtgctgcaatctatcctcactgcctggagcttccctcctgtcccttggtaaccacaccaaagaaagataacaacagtctctgcctcgtgggacacagcgagggccaccgtgcccagcccaccgtctgtgcacagggcaggcccagatggctgctgccaccaacctgtgtcatccaggagtgcctttctcaagagctctcagtgcttatctagcgttggcctgccccacctcgggttaaatcaaaacctctttggtggctgggcgcggtggctcacgcctgtaatcccacggaggccgaggcgggcagatcacctgaggtcaggagttggagaccagcctggacaacctgacaaaatacctctctactaaaaatacaaaaaaaaattagccgggcgtggtggcgcacacctgtaattccagctactcgggaggctgaggcaggagaattgcttgaactgagctcgggaaagggaggttgcagtgagccgagatcgagccactgcactccagcctgggcgacagagtgagactccatctcaaaacaaaaaaacaacgcctctttggaaccagcagaggaacagactcaggccctattagactccagccatgcaaagttcctagtcactgcccactgggagggtgtggacctgaagggacgcagggccaggggaaagctctttctgctcagcagctcctggagaggagcgaccctgtgccgggacacccttccccctgcggcatccagcgcagcccatctctgagggagtcctggctcacagcgtttctgacaggagtcacagcctgaacccaggcaagaggcgcctgagtgggaacaaccccttcctggggaccccgcgggctccccaagggacacttcagacccggaagggaggggcagcgcccagagcgccctcttgcagccccgggcactgcgtggccaccgccccctgacggccacggccccaaaggcgccgcgcagggcccggctcccagaggggccactcggggtgacgaaccggggtgggggcgggttcctcccgctgcacccccacaacttccccacttcatgctcttgcaaagcccccgcagaggctcgaaggtgccacgcgcgtgcgaggcaatccgaaggcaccgtgcgccgcagcacctccaaatcctaagccctggcctcgcgggtcgggcagggccacaccccgagccgacaacatagaccaactcgcacagtcgagcaggcacacagcccgccgggcgctcgaggccgagggccccacccaccgggggcagagaccaaggtcaacgctgggggtgcgcacccggactccttccccgagccccgaggagcctgccggcttgggccaggtccgtcctcccggccgcttcaagcccgcggggttccacccggcacgtgggagaacggggcgccgccgcctggcctccgggagtgggggacttgggctcgcggcggggacggaccacccgcccagctcggccggatctgcagccccttcccgctcgccagtggagtggaggcgaggcccacgcctaccggtcctcgcacgcggtctcgcttttctcagcctgccggcctggtgtgtctcgggccgtaggtggcgacgtgggcgaaggatcagcgtccgcgcgggccgggggcgcagccatggcgctcggaggcctctttgcgggcctggccgggcggcgcgcatgggccgccgggagctggcgggtccctctcttgcccaccgcggactacaagccccacaaggccgcgcgtcgcggactacaagccccacaaggccgcgcgtcgcggactacaagccccacaaggccgcgcgtcgcggactacaagccccacaaggccgcgcgtcgcggactacaagccccacaaggccgcgcggcgggcatgggggacccgtagttcggcagcctccgccacgtgcctggagggccccgccccctgtttttcaccacaaactgagccgcacaaaaaccctggaaaaaaatcaataaacatttatttgatacagtcattttaatacatacagtgatggcccgtccccacgccactcgggaccagggcgcggggcggggacgaggaccggggacagatggtcacaaggcgggcggggcccgaactcaccgttgaaacatctcgcaaataaacactttgtagatagaatatatatgtatatatatatggttacaagtgatagctggaacctctttcaaaatgcacttatgtactgagaactggcattaaaaaacccaaaccaagaaacccaaagcacgggacgcccggccgcgaggcaggggaaagcctggggccccagacccgggcctgggggagccgcctggggccccgccaaacgcggcacacggggacggcccctcccggggtcaggctcactggctccttcccttcagcgccaccaggcaggagggccaacggtcacacaggaggcaccctcacctgcctttgcaccagcaaataaagtgcatcccattttcgtgtgagcgtcggcccggtgagtcagcccttccgggccctttcctgttctcagggcagggggcgtgcgctgagccagaggtagatctgcagaaagggccccgactgggcctcgggcagggccggcgcccaccacactctgggggtcagctatgctggtccctctcactgagggctcctggaggcctatgtgggccagcgtagggagtgggcagaccctgctgagctccacccagggccccaccccttgggaggagggctctgcggaccagcatgtggcagagggagggcagaaaggagggggtcagacccaacagccacttctggcagtagc

SEQ ID NO: 94193 - DNA, 12301 bp, Homo sapiens
attatttggtagaatttgaagtatttttttaaaaaataaaagcacttataaatgttttatttcattgattgaagggaaattttatgagatgtgaaaggaaagttaaatatgaattttgtctgcttttgccactggccctgtactgtgtcctgtcatatgattagcagcagataacaatgctctgtatgaaccatatcacaactcattctggctttattgaattacttttccaccacagtcaagttggatctcacttcaagggttgcttcaatttcaagatttctgcatacacatttctatatgactataaagtaaaaaatcctctatcctcaaagatattttttagtagctgagaaacactgccactaaaaacattctgtaaagaacgtcttggagtaatttataatcactaactagcacagattgagcacttaatttgtcatatgccagacctatactatgcattttaacaaacattatttcaattgtccctttaaggtaagttggtagtatctccattttacaggtgaggaaaatgaagcttacagtggctaattagtrtgctcaaggtcacacaagtaataattatagcccagatgtgatgctatacagaattttgttaaattcttaaagctcactccctctttctattatttatactgtgtagctcatctttaaaatcaccaatattcagttgtacagctatgctatcctattaactacattttccttatatttgcttccagttagttgaattggcacttactaaagaaactaatttgatcttactgtttgtaatttctcttccatttactgtcattatcttaacatctcaaatcctattgactgtgaatcttctaaacccagttttcttatctacccagggaaagtacaaaaagaacaaaacctacatatgctatagaacaaataaccttattccaggctaagtgtgagttacaaggtgaggataaaagtataatttcatggaggaaacagggcattctcatcacctgtgaattggtattactgagcgtagtctcaccatgaggtagctttacagtgatgggcatgtgttcttggaaactgattacatgagtttgaatcccaacttcaacatttgtgcctcaacttcctcatccataaaatagtataataccaaacacgaggttgtttagaggataaaatgacttcacaatataaaaatacctagaatatacccagaactgaataagcactatataatattattattgaaaaaagagctctgaaatacctgccacatatatattcaaataatttcaaaagaacatttaagaacacacattagtgtgtttaaatgatctggtattctaaattatgaatgttgctgcccaccccctttctcatccccattggtacagaaaataatagagctcaccaaatatgaggacgactgtttataactcaacatctaccatgtggatgagtattttccgggttgtatgattagttttactgagttgactggtaaaatatttcacagatccagcctctgcatatctactaagaacttctggctgagtacagactcaaacaccaaaacatcacagcctatcctggtgcaaactttcctgtgctacagctgctcccaggctgaatttttaatttttaattttttagtttttaggaactgagaatctgattgtgctggatttaatccctagtctgccacttaatttctgtatggtctttcacatgtcacttaacctctcttcttataggatgttgataatggtccaccctcaaaccaaagtaaaacaaaactgccttgtgaagaagctgtcgtttgatggaatcactaaaagtgagttcctgtatttactattccttttgtcaccatcacctctaattatcttcattcatgttcccaagtcctttcaggatcctccattctctctcaatctaaagaaatgagcttaaactatctgaaagcacttggggattaaataaaacactggaaaaacagaaggcaagaattatcaactaattcttccagtttcatttctccagtgctttctcacagattctaaaagttactcacactttttttttaacttgctaattaactggccttctttgttgtagctggtgtcaattaaatagaaggggaaaatgagagattatttatgcagcccagagaagagtttatggtcaagtccctttccgaagggtacaatgtggcaggaaggtataggggaaatatgaaaataatttcaaaaggatgaaaatttaataatggactattataagtgtcaagaaaaaaagtaaatgacttccataaggcaaaaaaaaaaattattggatgttctttcagtagaatgctgaaggttgtcttaattttataaggatctgcatctttcattgtctttgactagaatattctatagctctgtagagatggaagttaacctacagaaaagtaatggtgacacagatattctttgtcacagtaatgcaattggctcctgtttatggtaatgcaaatgaatttgttgagtagatacgtaaatctccattagttaaattctcatttgaagtggttataacatcttactaatttactcattagttgatgagttaaataaaatattttatatttttgagacacataattttatcattttgaaaactatattttagtatagatacaaaattaagagagatggtgaaatgactaaatctgctgcagtgagagaaaaggtcaagaaaggcttcatggagaaagttagcacagagaaagttaaagaaaataattgaaaatttcctagcagacaagtagaatagaattctaggtaggggaaatccgagataaagactcataaacgtagaatagcacttttttactcaacactaagaaatgaagtgaaagatagttaaaatacagttctgagtgtcaggaactttatagatgagtagatgacaaacaaataagacaggtgttattcagtataataagctaaaaaatgacaaaggtgctgtgaccacatagacaaagggcatcaaatttctaaagagaagctaagatgtattttggaggacttactgtttgtgatgaatcatgacaaataaatagaaattacctagatgaagaaggaaagatggacatttgaagcaggggagaaaacgtggaaacataaaattctaactttacaaagtgctagttcttcacaagttttcaactagaagaaaaacgttaaaaaataaatgttgtgctacttaatttatgcccataacatcctagacatgaatcatgtgcaatccatttctcagaagtatacctcagtatgaaacaaataccatgtacttattccaaatggtttatttacctacacccagacccaagattcagtcaacttagtgtctgcctcagcatccataaatttccctctttctgtactcactttcctctgcacttcttgcttcctcaattatcctgtccctcaggaccttcttgaccttttcttcttctctgcacttcttccagttttccagttcctcactgaaggtattttgtgaggtccctagtgtatgtctctgagggaagttagggtcttcaaattgaggtttttataagacaaacaaaaatttttggctatatcaattgcctctcctagagtagttcagggtattattatgttaataaattatctgtctttaaaaatgcctttcttttctgttgggaataaaatcaagaaggaaagatggggataaaaagaaaagaattttatcttcttccaccacactctctagtgattcatgaaaactatatttattcagcctgaagtactgtactgttatttgctctgtattagtgaattcatgtgtgtgtgtgtgtgtgtgtgtgtgtgtgttaaaatactctttcttttatggaacactcgttgtagttactagcaacatattttaatgcctttttggcaaaagagaaagtcaccaacctccattttttaattttaaatgagagtcagcactctcatttttgtttaattctcatagtgaaatccataaattaaagaactagactagataatattcagatcttccaacaagatcaaatggtcaaatcattcagagccaagactatgatccgaactattagacttttggtccagtgttctttctatcattacatgctagaggaattcaaggaatctacaatacatcacctacaactgaaaagtcagtaatgcaaaccatgtcagttctagctctgagaaataatggtttaagataaattttgatattgtattaattggtgttaaaatttttaagtctaacatttatattgaacataactttttattccctggactggaaaaactaaataatttaggtgattattcaattttacttcaagaacccaaagataatatgtatgaattatttgtttgcattgaatcctaataaaataaatagagtaggttacttgtaaggaaccttttactttccttttaaaaaaaaaagctttcaaaacctgaaccacatttttttaaattttattattattatactttaagttttatggtacaggtgcataacgtgcaggtttgttacatatgtatacatgtgccgtgttggtgtgctgcacccattaactcatcatttagcattaggtatatcttctaatgctatccctcccccctccccccacaccacatggtttatgagagcaaaaacattatactcacccttcacgggtgaagtactatgtatttgtaatgactcacagagctacactcaagcaatttgaaatgacaaaagtatgaagaaaccagcgcatttaaatgaaaaatgaagataaatccaaatagcatgaattgtataattttaaagaaaacttatgaacacacatgtgttgacatgttgaaactgaatattttatttgaataattgaaacatcatcttggtaaacacatggactggtttttttttttttttttggttttgggttttcattttaagcattgtaacctcccaacagaagatggttaaaaagtgctgtaccaagctctgtctaaccaggaatccgagagtctctcttaagcactatgaactcaatgaataaattaaatgatgcctctgttttacctggaatgaaggtcatttcttgctgtctcataatgctactcttaaaattttcattggcaattaaatttcacttagcacactaacaaaaaaaataagatattatataaaatgttttccagaagatactgtgaagtgaaaaaagtacaaaacagcatatgctatctaccttttaagaaggaaaggaaaatataaaaatacaaatatatgcgcccatctctacaaaaagaaaacactgaaaggataaatcagaaaactataatgttgtttcctacaaggggcaggtgggaagcgggcagaagggttatagttgagactgacacatttttgtaaatgcctttcagagccttaacttttagaaatatatcaatcatctgtatgttaaaaaaaatcaacaagaataagaaataggtgaggggactaaaactgaaagcaaataaaatgaaactaaaacaaataaatgaatccaagtgtatttcaaatgaataaaatctcagagaaaggtgggtttgggtgaagggactctaatgcaattatcactaaggggcgagcaagatgtttatatgatcttaaaatgtctgtctgcacgttgcttattagttgcaaaagaaagaactacataattgagaaatcacacaaggcactaagtagataatcagaatgaatatcacaaatgaacatcaaaaatggacacagttgtggtgccttaggaagcatacaacctcacttttgctatatttcaaaagggaatgcataatctgagtctattcatgaggaaacgttagtcaaacctaaattgtgaaatattctattttaaaataaagggtggatggagagacctgtactcttaaaaaatatcattgttataaaagtcaaggtgcttgtgacccaccttccggaaggaagcggttaactatggcgacctccacggagcagtgggttctggtggggatggtacaggygctttaggaggctcctgcttaccatcttattttggaagggattctgttactctggataatcagacttcttttctctaagacttacaaattacaggaacgatcygatcttacagtcaaggaaaaagaagaactgattgaagagtggcaaccacaacctcttgttcctcctgtcccaaaagaccatcctgctgtcaactayaacatcgtttcaggacggagtcttgctctgtcaccaggctggagtgcagtggtgcgatctcggctcactgcaatctccacctcccaggttcaagccattctcctgcctcagcctcctgagtagctgggactacaggcacaagccaccatgcccgcctaatttttgtattttcagtagagacggagtttcaccatgttggccagaatgatctcgatctccttttttttaattaaaaagtaaactttaatgttgaaaatgcaaacttggggaaggcagaaagataacacacaaggctgtcacttcacacttcgaaggttgcaaagcaggcgggcagaggcgctcctcacttcccagatggtgcgggggctgggcagaaacgctcctcccttacaaatggtgagggggctgggcagaggtgctcctcactttccagacagggcggcgactgggcagaagcactcctcacttcccagatgggatggtggccaggcagaggcactcctcatttcccagagagtgaggaggccaggcagaggcactcttcacttcacagacaggacggcgatgaggcagaggcgctcctcatttcccagacggtgaggaggccaggcagaggcactcctcacttcacagacaggacggcggcaaggcagaggcgctccttacttcccagacagggtggcggctgggcagaggtgctcctcacttcccataccgtgaggcggccaggcagaggtgctcctcacttcccagaaggggtggaggctgggcagaggcggtgctcctcctcaattcccagatggtgggcagctgggcagaggcgctcctcactttccagacagggcagtggccaggcagaaacactcctcacttcccagagtgtaagggggctgggcagaggcactcctcgcttcgcagacaggacggcagctgggcagaggcgctcctcacttcccagacagggcggcagcctggcagaggcactcctcactgcccagatggggcagggcccaggcagaggcgctcctcacttcccagactgtgaggcggctgggcagaggcgctcgtcacttcccagacagggtgggggacgggcagaggcgctcctcactgcccagaggtgcagtggccaggcagaggtgctcctcacttcccagacggtggagcagctgggcagaggcactcctcacttccaagacggtggggcagctgggcagaggcactcctcacttccctgatggtggagcagccaggcagaggcgctcctcacttcccagatggtgcaggcagagattctcctcaggtctcaatctcttgacctcctgatccacctgcctgggcctcccaaagtgctggattacaggcgtgagccaccacgcctgccctgccgtctcttctttctcctcctaagcagctgtcttagtctcctgaattttgatgttctacttaacaccctcctgttcttatgcatgttgccctgctggaggcgtccttctctttgggaagcctgacccaccaacagtgcctcaggagatagacatggaagcttagccggtgggggcccctcatctctatcccacctcagttgcaggggaggggtcggttgcagctgcagcggtggccccgacagttttcttttgcaggacctgtggctgacagctctgggtggagaagacctacttgatccaagagctgcaggatccttgggctgcatgtcctcccccagcatcagcaagcatggagagctgggcaggtggtctttacccagcaccttcaaggccgccttctctggccacagggagcagcccggaactggggcagggaccactgttggaagtgggtcaggcttcccaaagggaaggatgcctccagcagggctgtgtgaactggagactccatggcccttggagtagaaactcactgcatacacctgggccttgtcagtctggttcttttctgccaagctgttgaggtggacatttccctccaagggcctgggattgtaccaggaggaagtgaggtttccctgagtctccaggggcccagaggtgaaggctgcttccccattgctacaggggccccttttattgtccttctgcccctgggtctctacttggtatttcaccttcgttgcttctttgggctcttctgccctcacctctgtcttcgggagcctggctgggatcacctgctcatctaatgaaggaagttgaaggttaaacttgcctctgagataagggatcctcacggggctgaggtgtccaaacatcatggagttgcaagcagacagcaagggtttcttccttgagggggagctccagaccacaggaggcaggaccctctgtggggtgcccgtgttccgagggataagactcagcctcataggggcgccrtcccacctgactggaaaagaaggcccaagatgtcactgacggttgaagaggagtgggaaacggcccaagattcccggggcaggcacaggtgcaggagcagcagggtgagcccggccagctgggaaggcctcacggacaagacgagcaggttgctgatggcatggccaggacctgcggtggaaccaggaacaaaatacacttagtgagttgcccattttgagcaagttgtgcacagacgaaactaagggtcagaagtggagaggatactcctaagtcacccacttctatgtggccgggtgcacactgggcatctgggagtttatgacatcaccatggggctggtgacagagccagggtgtggaggagtgcttaggagcccagcgagggtgcctacaagaggagtcaaagggcaaagggtgagacctttccaccgatccagctggactctagcctcagggacgtcctgctcctgggggcaggtgtgtggccctggatgggcccccctgtggggctgttggaggtgtggggctgatccgccagagcccttctgcctggtgcctggtccaggtcctggctagcacccagtggccctgtcttggccggccctgtcccccgggttacagggccagaacctggaagcagagcgcaggaccagccagatcccgccaggctccccctgggcctctccagtgcctctgtgctgcctggagccaggcccgccttctccatggctgccgtggcctcaagggccaccagccttgctccgcaggtttccaaagagaggacgcggtgccctgacctgactggatgcgcctcttaccacatgcctccctggcaggcagggtctccactttttacaaatttgcctgagaccattcctcaggtcattcaggtggtcatggcccagccaggctttgaacccaggctgtgtgattccacagctggcgctctggcctgtgtgcctcatgatcatggatacagcatctattcttattttttcctgtagtcctggggtacttagcaccatggcatatctgtaataagcacatgcacaccttgaaggaggtcttcacttcaacatacaagttgaccatggcatgctctgggctccagtcctctacaaagatgtagggcaggaactaccagttgtcagcacagcaccatgacacattgctcttctaatggagcctttcaccccagatgttctttctcgtctgatgggaaggatccaagtatgtaaagattatgttctagataagctttggtctgtcctaaaagaaatttgccagtggcttattccatatggataaaagtcagtttctctggtcttcctggaatgtgtctagaaagcaaatacattatttacaagttcatagtagatcaatgtattggattaaaatatgacaaacataatttggtcattgtgagcatgccagctcagtcaactattcaccacacatgatgccctaaatataactctaggttttcttatgcccaagagagggacatactcttgggtgtctggactagggaaatatgtatgaaaaaccatttggccactccacatcttgttattggagaattgaaaccatctatattcaaagatattattaaaaggcaagaagttaacttctgtcaaaaaaaaaagtcaaaaggctgagaaaaaatacttcttttttattattatgctttaagttctgggatacatgtgcagaacgtgcaggtttgttacataggtatacatgtgccatggtggttttctgcatccatcaacctgtcatctacattaaacatttctcctaatgctatcccttccctagtcccccacccccaacaggcctcagtgtgtaatgttcccctccctgtgtccatgtgttctcattgtttaactcccacttatgagtgagaacatgcagtgtttggttttctgttcctgtttgggtttgctgagaatgatggtttccagcttcatccatgtccctgcaaaggacatgaactcatcctttttacagctgcatggtattccatagtgtatatgtgccacattttctttatccagtctatcattgatgggcatttgggttggttccaagtctttgttattgtgaatagtgctgcaagaaacatacgtgtgcatgtgtctttatagtagaatgatttataattctttgggtatatacccagtaatgggattgctgtgtcaaatggtatttctggttctagatccttgaggaattgccacactgtcttccacaatggttgaaccaatctacactcccaccaacagtataaaagcattcctatttctccacatcctctccagcatctagtttcctgactttttaatgatcaccattctaactggtgtgagatggtatctctttgtggttttgatttgcatttctctaatgaccagtgatgatgagctttttttcacattttttggccacataaatgtcttcttttgagaagtgtctgcttatatcctttgcccactttttgatggagttgtttgtctttttcttgtaaatttgtttaagttccttggagattctggatattagccctctgtcagacagatagattgcaaaaattttctcccattctgtagattgcctgttcaccctgatgatagtttcttttgctgcacagaagctctttagtttaattaaatcccatttgtcaattttggcttttgttgccattgcttttggtgttttagtcatgaagtctttgcccatgcctatgtcctgaatggtaatgcctaggttttcttctagggtttatatggttttaggtcttatgtttaagtctttaatccatcttgaattaatttttgtataaggtgtaaggaaggggtccaatttcagttttctgcatatggctagccagttttcccaacaccatttattaaatagggaatccttttcccattgcttgtttttgtcagggttgtcaaagatcagatggctgtagatgtgtggcactatttctgaggcctctgttctgttccattggtctatatataaccgttttggtaccagtatcatgttgttttagttactgtagccttgtagtaaggtttgaagtcaggtagcgtgttctttttgcttaggattgtcttaggattgtcttggttataggggctcttttttggttctatataaaatttaaagcagtttttctaatcctgtgaagaatgtaaatggtagattgatggggatagcattgaatctataaattactttaggcaatatggccatttcacgatattgatttttcctatccatgagcatggaatgttttcccatttgtttgtgtcctctttgatttccttgaacagtggtttatagttctccttgaagaggtacttcacatcacttgtaagttttattcctaggtattttattctctttgtagcaattatgaatgggagttcactcatgatttggctctctgtttgtctattattggtgtgtagggaggcttgtgattttttgcacattgattttctatcctgatactttgctgaagttgcttatcaacttaaggagattttgggctgagaagatggggttttctaaatatacaatcatgtgaatggcaaacagagataatttgac

SEQ ID NO: 94194 - DNA, 12296 bp, Homo sapiens
gcaaagccacagtactgcgtttttcatcctcagctatacatgtcttaaagaggcatgctagtacctgctactttctgctctccaggttctgtcttcatgacatccctgttacagaaggccagggtgatgttctggcatgatggtgagatgatcaaggctcctagaatctctattgtgatacagaactgaaaattgccataacagacatcaaagagtaacagtggattcctgattttttttttcgtgtgagagcaacttttttctgggttctctgcatattggtattgaaaaaacaaagacaaaaattataaagcttatgagtagctgcacacagttgctaggagctacagttgctgttgtcacttgatttaccttgccataatctgtcatcttccaagatgcttccgtattcttcacagatcagttggtgagttgagatgaaaatgtgacaaaaagcaccatccttgcaactttcaagtctttgatggtaacaatgaccttgacaatttcacccatttgcaaagaaactttagatttactattctggaggaaaataacagttccacgggttcttatttggatatttctaacataataggccttcctccgtggatcagggagccaggcatttctttctagccatgcacacagttaactgggaaggatagccttggagttctactctcctcataaggtagactccaggaaaaacaacatttctcagatagcctccgtagcaaagctggtagactgtagtgatgtcatgcattcccagacttgttgaaccagtgttcaataatctctaaaatatctaggtgttttcctttgttattgtatatgggttccctagtaaaagggctcaggtctctttgggagaagggtgggaagaacagtgatcacatgtacttgtgatgttgtcaagactccagcctcctcttcattcaaagggctgtgagtttttgagctgattcaaatgcaggaattgggtaagaggctgttactctctatttgaggctcaaaccagacctttctttatccatcctgaagttttctgttacgcagacctaataggacatttgtaaactatccatgaattttgtgtcagagactttactatcccttagcaagtagcaaagatccctgtgggttgaagcatgtacttcccactgtggctcagctgcctaatatttggtccacacccattttatctctgacagttggatgctgctatttgacatccagaaagaccatgtcagtagtagcatcttccactcacgttattgcctaaagagagccagctaacgagctttttagagatgttgatactccccacccacatgcagttatctacatcctggtgggtgccatgtcttccatgctcactcaggtatgaggttaagggatagattagtggacagtccaatcttctacattcctatctctctaggactttggtatctttcttgttcattgcactgaggaatttctggcatatcaatttctcttaagaaggccaccactgaattcaatttaattctgccaaaagagcaagttgctagaggcacttcagggtggtcaagctaattattttaacctagactatctttacagagtatgcctaatgaaatatttagcctaatccaaaactatgtccagccctctctagcctatatccctcagaatctgtgaatcactattcgagggcttatgctgggccctgttggccagtgaaggctctcaggtctaatctggtaagacaagacactggcacaagtgaggcaaagtgactttgttactcacatgtagtcacaaggataaacacaagcctagggttcacggcgagccagcctttcagtgagaaggaaagtggtgcagtgcagatggaatctcattggtatgtgttccacattccactgcagctgagggaccctggaagtatttcgttctgggttttataccctgggtgcaacttggattgctgagcataagtactgcagaacatcctagtctgggaggaaggaagatatagcctgagatgttctggacatttccttcttatcttaggatgttgcattgcaagcaagagagggaagagctgggccggccaaggctatccagggacctgtcctgcaggcagtactaaagttttctcagttacatagacttaatgggaccttagagaaccatccatcatttttttttgcctagagactttactctcctttaaaagtatgtgtgaaacatacttttaaaaagtttctgttagtgggcagttcttacaaatcgttggtgtgtaaaccttttcctaggtatgatttgtttttagcatcccagggcccacagggttctgcacctagttataggttagagacaatgtctgggaggggtggggaggaggcctggaggacattttaagaggttaatgctatgaatgaagccattaggaggtctttaagcaaggcaggaagaggatcatcagatttggaaagaggggtgttttccattatacaggtctttgggggttaggagtataaggcccccaaatcctcttctttggtccagttcccatattcaagattatagtcattcctctttgatgccttaatatccaccaatgaaatcaggcaatacagtgaattcctctgactctgaatgttggcaaccctcagactcaacccttgactttgatttttggctacagaagccctctgtctgcagtaaagataagtgattctttcagcacagccatagaaatcaaagaaagtccctggttttctgaccatgccttgggctaacaaatactttggaaattgttttctttctttaagctcttcagctcagaagcagccagcttaccttatcatccttgcattccatttacttgaaggcttcttgacagcagacacttctagaatcaattactacacccaccggggttctaagttgcaaagagcagggctcactggagctagttcaatcaggaatgcaatttattaaatcatatgagaggctcctggagactgcagatgggccagggagcagcttgaacaatggcatggacagcttgctccaggggaaatctgacaggtgtcccgcacattgtgtcacagcctgctccatgatgctagattggggggtgccaccactgggacctcttcctgttatgtctcagccaagacccactagccttcctgaaatgctttaagggcatcacccctttcacatcacccttttctgagctggaatctccagtgagtgcatgggactggcagagctcatgcctcatgcctgcactttgctctcaaggtgctaggaaagcaaggtgttcctttaactttgggtgagagcacaaggtgagaaattctgcaaactttagatagggattcaaaaggtattatgaatactttacaaatatgaaggtagctgtggactttaaccaatgcccactgcaaagagccagccccaaatgttacctaccccaaatgccacctcctatcacccaatctaaaatggcccacacccaggatactctttgtgcatagtcacatcttttaaggcatatatcatattttgcaactatcttgctgatgtatttatttgctatttttctgtctctcacctaattaaaatgtaaagctttagaagagcttagcacagttcctggcagatggttggtactctgtaaatatttgttgaattaatgtagctgtaaaatgagatgtttctgaataatgatcttaatgctggttttcaaattgtctaacacttttttctcaaggtgcagctggatggccacctaggtggggaatccccatctgggaccgagctctcatctgtctctgcccctgcatcagcccaaggagtttaatctcttcattgttagctaaacagtgaacaatagagtttttaaaattacctatttaacagtgagttttttgacatctcaaattgtaaactatttcctccctgggttaagtcatttatacaggaattgttggttgctacaataaagtgagacagatgaccttaatcaataattttgtatttttgagatccttaccctgaattggaaacctactaagttgttcatctgttcagaaccctacaagagcttgccaatccctagaatactaactcctcccccagcagcactcggagcccctgacaacttactgtccccctttctttctatctttgtttccttctgtcctgcacaatgagctcacatttcaatccatgtgtgatgaacacactctcagaatgccagaactgaaaaggactcaaaaagcaatcttgttaaacctcttgttttaatacaggaaaatgctaaatcccaatgaggttaactgatagaaacatagtacacactacttaatatttcattgactgagtaaatttcccaagatcatactcctacttagtggaatagttcaactttgaaagcagcctctgagcatttttatccagtgtttaaatttttgtttcagtcctagtaatggataacatttactgagcactcactaagtgccaggtatatacaggaacacatttaatccttgcaacacccttatggagaaggttactattgttatcctacctcaaagctgagaaaactgatgcacagtaaagcttatgtaatttaatcatagctgcacagttaataagtgccagagtggggatttgaactccagagcctgtgtgcataatgactgtgtgattctgcctactgtgggctgaactgtttctcctcaaaattcatgcattaacttcctaaccccaggaactcataatgtgattgtatttggagataaggtctttagagagctaatgacagtaaaatgaggtcactgggatgggccctaatccaacaggactggtgtccttatgaggagaagagattaggacacaggcacccacaaagggaagaccatgtgggacgcagggagaaggtggccatccacaagccaaggagagaggctcaggagaaaccaatcctgctgacaccttgatctcagacttccagcctccagaacagtgagaacataaatttctgttgtttaaaccacggggttgtccctaacctccagaccgtggacctgtattgttctgtggcctgttaggaaccaggctgtacagcaggaggtgagtggctgcgggtcagtgagcattatggcctgagttccgcctgctgtcagatcagcggcagcattagattctcataggagcacaaaccctgttgtgaactgcgcatgcgaggcatctagattgcgcgctccttatgagaatctaactaatgcctgacgatctgaggtgaaacagtttcatcttgagaccatcatcccccctacaccgcccccagcccccgccatctgtggaaaaattgtcttccatgaaacccgtccctggtgccaaaaatgttggggactgctggtttaaaccactcagcaggccggggcgtggtggctcacgcctgtaatcccagcactctgggaggccgcggcaggcagatcacgaggttaagagatcgagataatcctggccaacatggtgaaaccccgtctctactaaaaatacaaaaattagctgggcatggtggcgcatgaatgtagtcccagctactcaggaggctgaggcaggataatctcttgaaccctggagggggggttgcagtgagccgagatcgtgccactgcactccagcccgggcaacagagcgagactcagtctcagaaaaaccaaaacaaacaaacaaaaaacaacaacaacaaaaccctctcagcctatgacactttgttacagcagcctgagcaaactaagacactgcctacacgtgcataccgactcccatatctcccaaagcctcggtatcttctttcatagcattccctccatctccagtgttctttgtcccactttttacctcccttctttcatccctccatcatgtccctattcttcctggaccaccttagttactatctcctccatgaagctttttaaaattaacccctagccttccsgaaggaagyggctaactatggcgaccgccatggagcagtgggttctggtggagatggtacagttgctttacgaggctcctgcttaccrtcttattttggaagggattctgatactmtggataatcagacttcttttctctaagactyacaaattacaagaacgatctgatcttacagtcaargaaaaagaagaactgattgaagagwggcaaccagaacctcttgttcctcctgtcccaaaagaccatcctgctctcaaccacaacatcgtttcaggacggagtcttgctctgtcaccagtctggagtgcagtggtgcaatctcggctcactgcaacctccacctcccgggttcaagccattctcctgcctcagcctcccgagtagctgggactacaggcacaagccaccatgccggcctaatttttgtattttcagtagagacagagtttcaccatgttggccagaatgatctcgatctcctttttttaattaaaaagtaaactttaatgtcgaaaatgcaaacttggggagggcagaaagatcacacacaaggctgtcacttcacacttggaaggttgcgccgccgtcctgtctgcaaagtgaggagtgccaagtgtgatccgcccgcctgggcctcccaaagtgctggattacaggcatgagccaccacgcctgccctgccgtgtcttctttctcctcctaagcagctgttttcgtctcctgaattttgatgttctacttaacaccctcatgttcttacgcatgttgccctgctggaggcgtccttctctttgggaagcctgacccaccaacagtgcctcaggagatagacatggaagcttagccggtgggggccccccgtctctatcccacctcagttgcaggggaggggtcagttgcagctgcagtggtggccccgacagttttcttttgcgggacctgtggccggcagctctgggtggagaagacctacttgatccaagaactgcaggatccttgggctgcatgtcctcccccaccatcagcaagcctggagagctgggcaggtggtctttacccagcaccttcaaggccgccttctctggccacagggagcagcccggaactggggcagggagcactgttggaagtgggtcaggcttcccaaagggaaggatgcctccaacagggctgtgtgaactggcgactccatggcccttggagtagaaactcactgcatgcacctgggccttgtcagtctggttgttttctgtcaagctcttgaggtggacatttccctccaagggcctgggattgtaccaggaggaagtgaggtttccctgagtctccaggggcctagaggtggaggctgcttccccattgctacaggggcccattttattgtcctcctgcccctgggtctctacctggtctttcacctccgttgcttctttgggctcttctgccctcacctccatcttcaggagcctggctgggatcacctgctcatctaatgaaggaagttgaaggttaaacttgcctctgagacgagggatcctyacggggctgaggtgtccaaacatcatggagttgcgagcagacagcatgggtttcttccttgagggggggctccagaccacaggaggcaggaccttctgtggggtgcccgtgttccgagrgataagacacagcctgacaggggcgccgtcccacctgactggaaaagaaggcccaaggtgtcgctgacggttgaagaggagtgggaaacggccccagattcccggggcaggcacaggtgcrggagctgcagggtgagcccggccagctgggaaggcctcacagacaagacgagcaggttgccgatggcgtggccaggacctgcggtgggaccaggaacaaaatacgcttagtgagttgcccattttaagcgagttgtgcacagacgaaactaagggtcagaaacagagaggatactcctaagtcacccacttctctgtggccgggtgcacactgggcatctgggagtttatgacatcaccatggggctggtgacagagccagggtgtggaggagtgcttaggagcccagcgagggtgcctacaagaggagtcaaagggcaaagggtgagacccttccaccggtccagctggactctagcctcagggacgtcctgctcctgggggcaggtgtgtggccctggatgggcccccctgtggggctgttgggggtgcggggctgatccaccagagcccttccacctggcacctggcccagatgctggctggcatccagtggccctgtcttggccggccctatcccccaggttacagggccagaacctggaagcagagcgcaggaccagccagatcctgccaggctcccccggggcctctccagtgcctctgtgccgcctggagccaggcccgccttctccatggctgccgtggcctcaaggcatgcctcgctccgcaagtttccaaagagaggacgcggtgccctgacctgactggatgcgcctcttaccacatgcctccctggcaggcagggtctccactttttacaaatttgcctgagaccattcctcaggtcattcaggtggtcatggcccagccaggctttgaacccgggctgtgcgattccacagcgggcgctctggcctgtgtgcctcatgatcatggacacagcatctattcttattttttcctgtagtcctggggtacttagcaccatggcatatctgtaataagcacatgcacacctcgaaggaggtcttcacttcaacatacaagttgaccatggcatgctctggcctccagtcctctacaaagatgtagggcaggaactaccagttgtcagcacagcaccatcccacattgctcttctaatggagcctttcacctcagatgttgtttctcgactgatgggaaggatccaagtatgtaaagattatgttctagatcagctttggtctgtcctaaaagaaatttgccagtgaattattccatatggataaaagtcagtttctctggtcttcctggaatgtgtctagaaagcaaatacattatttacaagttcatagtagatcaatgtattggattaaaatatgacaaacataatttggtcattgtgagcatgccagctcagtcaactattcaccacacatgatgccctaaatataactctaggttttcttatgcccaaaagagggacatactcttgggtgtctggactagggaaacatgtatgaaaaaccatttggccactctacatcttattattggagaattgaaaccctctatattcaaagatattattaaaaggcaagaagttaaaaaaataaataaataaataaataaataaataaataaaattaacccctaaaatatgcaattgctctattgttgtccttcctacaccttgtttacctctgcatggtgggcttaatacattctgccttgatttgtgattaatctgtgcaactgctttatacccccctactagataatgagttatctaaagacaatggctgagacgaattcatctttgttcagttcaagttatatttacgaggcccctgctgtatgcacccagcactatgccaggaggtcaaagtacaaggctaaggcatgatctctgtcctgaggcacttacagtctagtaaaggaaactttatgttcttggcaatacccataacactacttcacatttcttattatctaatatggcttggttgaatttaattgaaaattgatctactccagagaagataaattaaagatgtaaatgagagcaggttgttttacaaaatagcaccagcctctgaggcaagagatctttattcctggttgagtgggctgggtatggccatgcagggaaggtggccacagccagcccaggtaactccttggcaagtgcatctgaagcctgggacatcacagtcagacaaacataaaatccagaggtctcctgtgaaatgactgtgtagcagaggctttcattagacaaacttgagtctggaaatttacataacaaccatgcaagctggagacttgtatatcagagtgtgaagcccctaccttgtggcaggaggctgaggctggaccaatgcatgcatctgatcatctcagactccgtaagacccgatcttgctctttgatgccacctcaagatgaatgctgatggcaaacagccttctgaggcaattacgaaagactgatttcattatatctactcagaagttgcccgtctctggtacccaggtaaatcaattttcaattaaattcaacaaagctgcattaaataataagaaatgtgaagtagtgttatgggtattgccaagaacgtaaagtttcctttactggactgtgagtgcatgaggacagagaccatgccttagccttgtactttggtacccaagtatagggtggggtaggacaggtggaggaatgaaaagggctcctctgtgtttcatatttgaccttgcttgtggttttgttacaaaagcctggacattatgagtcaataatgaaatctattccatcttgctagggagaatattatattctcaattatttcatgatagctatataatgttttattgatgactccaatctagcctaacatcattccaaaacaggttaaaagcactcttgaaattgctgcaaactaaaaatgcaaggtaggcaacggccaacataggtccaaatattctacatgcttggaccttgaagtgatagtagtgggaaggaaggagaaagggaagtggaggaagaggaggtagggaagagggaagtggaagtagaagaggaggcctgactgggtgtggtggtgtcatgcctttaatcccagcatttgggaggctggggtaggagaattgcttgagctcaggagtttgagaccagcctgggcaatgtaagaagaccctatctctacaaaaaataaattagccagatgtggtggcacacacctgtggtcccagctacttaggaggctgaggccagaggatcccttgagcccaggaggtcaaggttgcaataagccatgattgcaccactgtattccagcctgggaaacagagtgagatcctttcttaaaaaaaaaaagagaggctggatcattcacttttgtttcacttttgtgatcccttttctcacttaaggagattctcctgtccctcctcagaatcctcacactaaaggttagatctctgtcttctatttataatctctctgtaactggacccttctcaccagcttttgaagatgctgcttcacttacatccactccatggggtcctgactccatttcttagatccctagcagggaagctgatgaaaatcttgaaataaactccagaaagggaggaggactgcctatctgctgaggagaaacagaaggggtggaagagcgggtggtggagggaatgtcaactttattctgacaagattgtttgtgtaataacaccctgtagggaacacagaatttgggtgatgtatttttaaagcacattaaccattacacatacaaaggaacgaacaggtagatgcaaacagtaatctcaagatgaattaatccagttgtggcctcagaaacctgaaactttccgttgttttcttgaaagcaaccaataattaggaactctcgatacaagaaatgctcactaaaaaagaggcagaatgaaatcattgttaaaccttacattttaaaggtatattgatgctggtttttttttacagagaagctgatgaaagtggtaatccccactccaccctaaaacaatatttttcttgtcccctttgggtggcctgtgtccttagtctaacaccatcggggtctttataggctttgagctcgttaacctttcactctcactcagaatcccgtaactgatcctcaggaggcacatggtgtttgcctcaggcaagctcagagcttctgcagacactttgtaagacaacctggcaggcttttcccattagcaacagggcctgggttcacacctcccacccccgcgactgattgtatatcctctttcccacgtgttctgtcttttcttcagagaactggaatctctcatgatcttggattttctagtgaggttattccataagcaggcatccctgagttgactatgaacatgtacctctggttacctatgcattgcagtcatttctgtagttttactacctgtgaaagaatggaaagagacaggagaaataatccagtcccatgattctcagtgtcttagtcagttccagctactataacaaaatacttcagactgagtggtttaaaca

SEQ ID NO: 94195 - DNA, 34714 bp, Homo sapiens
  misc_feature (1)...(34714): n = A,T,C or G
ctctcggccagcctccaagacgccccattgaccagcgtctcagccagctagcctgcttcccagcctcttggcaagtctctcagcaagccagcctctcagcaagccactaagccagcctctcaacaacgtggtctctgagctagcctctcaggcagccaacctctcaacctcccaacaagcctctcagccagccagcatctcagcaagcctctaacccagcctctcaaccatgcagattctcagtcagccattctcacctccaccctctcagctagctacacagcctgcacttggccagactccccagacagcctctaaaacagcctctaaacagcctgatatccagccccccagcctgccttttctccagtctcccatgcagccatcctctggaccagcctatcagccagcctcccaaccatcaagggagccagcctctcaaccagcctcccagcgagcctcttgaccagtgagctagatggcccttcgaccatcctccaagtcacccccttgacttgcctcagccagctagcctgctaatcaggccctcaaaaagcctctcagctagcaagcccctcagcaagccactaagccagtctctcagcaaggaggtctcagagtcagcctctcagacagccagcctctcaaacagcctctaagccagcttttcataaatcttctaagccagtctctcagccatgcagattcagagccagccccccatctgtcctctcacccaggcttccaggcagcctcttagccaactttccaaccagcctctcagcaagcctcccagctggactgtcggccaacctcccaggcgtcctttggccagcatcccagcccggcattggccgatctctcagccagccaaccaaccagccaacctctcagcaagcctttcagccagccagcctctcaacaagattctaacccagtctgtcagccaggcagattctcagccagccaaccagccacctctctgctggcctccccagccagcctctcaaccagcctcttagccatccactcggcaagccacccagcaagtctcttggccagactgccagcctgccagcctatcagccagaaggcctgtcatgcagcctcacaaccagcccctctaccaggcccccagcaaaccacacagccaacctttaatacagctagtcagccagactctcagcgagcaagcctctcaggcagccacccttcatccagcctctctgctaccctcccagctggcctctcattggccagcctcccaggtggccccttggccagttccccagccagccaccctcccatccagactttctcccaggtactaagccagccatactctcagcaagcctctcagcctggcaacctcacagccaggctctcagcaagccattcactcaacttgccactctgcctgcctcccagccagccatttggccatgcagccagtctttcatttagccctccagtcaacctctcagccagccagactgccagccagactgccagcctcttggccagactcacagctgccctttttgccagcctctcagccagccaacctgccagctggcctctcagcaagcaagcttctcaggcagcctctcagccgaccttttaggcagccagctctcagccaggctgtctgccatcctgcctctcagcaagcctctcagccagccagcctctcagtaagactctaactcagccagtcagtcagatggcctttgaaacagtcattttctcacccagcgtctcaaacaacctcctagccagcctctcagccatccagcctctcagtaagcctctaattagctcagccagtcagtcagacagcctttgaaacagtcatcttctcacccagcctctcaaacagcctcccagccagcctctcggccagcctctcagtcaatctctaagccagcctctccaccaggcatcctctgaacaagcctctcaggcagccagcctctctcagccaggcagattctcagccagccattctctcagccagtcgctagcccattcagccagccagcctgtcacacagcctcccatacagccctctaggccatcgtcccagtctgcctctttggaagcctctgatgcagccatcctctggaccagcctatcagccagcttctcagtcagcaagactgctagcctctcaaggagcctcccggctagcctctcagccagccttccagctggcttcttgactagcctcccagttggcctctcaaccagagagacacctggtctctcagcaagcctcccagccacacccttgggtggcccctcagccagccaacctgccagccagcgtctgagcaagcctctcagccagcctctcaaccaggcagcttctgagccagcctctcaggcagcaagcttctcaaacagcctcccagtcagcctctcggccagcctctcaggtgtcctcttggccatccaggcagctggcttcttggccagcttccaagacccccttgactggcctctcagccagccagccttcccgccaacctatcaataagcctctcagccagtcaccctctcagcaagcctctaagctagcctctcggtcagtgagattatcagcctgccatcttctcagccagcttttctccaagcctccccagccagtctctcaaacagcctcccaaccagcttcctggcctgccttttggtcagcctcccatgccgccatcctctggaccagcctctcagccagcctctgtaccagattgccagccggcctcttggcaagcctttcagccacccccttgtccagcctctcagccagccaacttaccagtcagcatctcagcaagcctctaatccagccatcctctcagcctgcctctaagccagcctttcaaccagtcaacctctgaggcagccagcctctcatacagcctctcaggcagcctcttgtctggctcttaatccagacagcctctcagccagtctctctgagaggtctgagtgccggcctctcagacttcctctggaccagcctcctagctgcccccttggccagcctctcatccagccagcctgccagctcttattgaagggctgcagggtgtcttgtctgcacatggcttccattaccattgaaggaacatttactaggagaatagcaattgtttagaagatcagttttactagcctttaaaataagcgcaatagcacattaaaaaatccaagaaatcaacacttaaaaaatttgtgtttctggactcagaattaacataataacaaacaatcagatttaaggggaaagaactattatcacaaattaataactcatccaatgcctattagttaagcaactactatatgctcaaaattgttttacatgatctttgccctcatggataaagagaacaaaggtaaaaaaaaaaaaatacttttgaccaaaagctctgttggcatcctactaaacaaatgcaaacctatttaattttcataatgtaaatggcagctatttttataattcttctgctaataaattatttttttctgatttttttggtaaaacccaatattcataatgaagtccagaaccatgaattgtttaaaatgatttcttcttatttatgattacaagtatacctctacaggaagtcagtatactcacaccaaagctagtattccagaagaaaatggcaaatttaataattcccaggaacacaacaacaatgttaagcatccaaggaattcaaaaaaagtcaggcccaggatgaagatggccaggcagaaaattgatgacctggaataatagcagttgaaataatgagaagggtcaatgacatttacaatatttcagtcacaaagaattatccttagaaaccctcaacctcctccaagaagtaagtgcaccctcagatatcaccaggggattccaccgtttcaagaaagattggaaattaccagtcccatgcttctcgcatggctggtagtcttcttaggctttgtgaatgtggtgtgtcttttttcttggtctaaagcagggatgtccaatcttttggcttccttgggctatattagaagatggagaattttcttcaacttgggccacacataaaatacactaacactatcaatagctgatgagctataagaaacacacaaaaaactcataatgttttaagaaagtttacacattcattttgggttgcattcaaagctgtcctgggctgcatgtggcctgtcagctgtgggttagacaagctaggtataaggtaattaccttttctttaaagttatttacttttatttacttatttacttatatttacttatgttttaaattgaatatgacattgtatctatttgtcatgtaccatatgatgaaagaatccctctgaatcatacttctttcttagagtacatgaatttttgctatttaaagatcagcataagtaaaaaaaatacaataaagagatgatttcattcagaaataagtatcaaattttagtgcttaaacataaccaatgtagaggtcataaaaatggcatgaatagtatggggtttctctaagattcttgatattaattccattagactcttacgtgaattaagacaaagatttcacctgagtaacttccaacaccttctgataacattcctacattgattccttggatttaactgtatattcttgaaaacatcttaattttaaatgtttcaagatggcgaattaaacagagatagccattcaacaggttaaactcagaatatgctgagtccaaaatggaaaggattgaattagagatctgtgcaacaatgggaatgatttcagaaacattgtgttgagcagaataaggcagacacaaaagagtacctatggcatggcatgcatctatatatgtgaaattccagactaagcaaaattaacctactatgagaaagggattggctaggaagagggagagttcactttctgtggtgacataatagtgtagatcttgaaaaggaggtgggttatgctggtgtaggtacttttcaaagttagtaaactcacacttaagatttgcatattttcttctatgtcactcttctttagaagaaaattttataaagaaatattgaattctagttaatgttagtcttgccaaactattcagcaggaagtatgttgatgcctccaattcagttggaaatacatgtaaaataagatgggctgagggatgggtagaggaatggaaagatgggtagatatgtgttgtcatgttcattaaaatgttaacaaatcaatgttgtatgtatgagcatttttataacaaaatgttgatggtaattgccaaaagtcacttgtctcatgtcagtgagttttcctttgaacaagagttcgaaaataattattattcatgttctatatgttggaacaatttgagacactctatcaattggatcttttccctgtcaattggccatgtagttgcaaaaatgcaaggatacacagggaaatcttgcagaggtgctgctttctgggttttgttgttttcaggacaaagaccaaatgggaagaacaagtcgcatatctctttccaagggagaggattggcaaactattggcaatggtactagaacattgtaaattgcacaggtggctcacattctatttcttttggacggtgctgccccagagctgtcttcagctttgcaaggtcagttcaggattggccaaaggctttttgagggattgcctttgaagtattgagcctggagaagtgggctctgagttctgacctcagacccagagacccacaagtcagtgagaggtcaaaaggacggacctcggggtcagaggagagaaatgaccatcacacagcagaactgagactttctgctcagaaatgtggagagtttgttctacaagtcagtagggaccacagtcaccatcagcactgaccacaggtttctcctaacctctgtgttgtccccaaagcccagaatttatgacaatgccctctttcctctctttggtgacagacaggaggcgaccgcatgagaccatggctgagacacctagtcctccaggcactgaggaactccagggcattctgtgggtcttgtgggcagccagcacctctacctgttcctcagaagatcgtggccacctgggaagccatcagcctgggaaggcagccggtgcctgaatacttcaactttgcccatgatgtgctggatgtgtggagtcggctggaagagatgaagmctgttctgtcctagagtccatctggggcatctgaggctgccctcatgtaccacaatgagactcaaggctccaagacatgttgatgaggaaatttggacctgggaattttgctacttctaaaatgtaaactgttggcatttgagacttaggaaaaaaattctgagtcagtgttgtgagccttagacatgcttgttccttctctgaagtgtcctgcattcttgagcccaaatcacacagtgagacagttatgtcccttccgattcccttccagttgttcatcaactgaaggaggaagttttgttttgctgctactctatctttgatgtctctctctcactgtcatgcccttctcttctaaataaggaaagaaggccgggcgcggtggctcatgcccataatcccagcactttgggacaccgagaagggcagatcacctgaggtcaggagttcgagaccagcctcgccaacatggtgaaactccatctctactaaaaatacaaaaaaaaaaaaaaaaaaaaattacccaggcatggtggtgcacacctgtagtcccagctactttggaggctgaagcatgagaattgcttgaactcaggaggcagaggttgcagtgagccaagatcatgccactgcactccagcctagacaacagagtgagactccacctcaaaaaataaaataaaatacaacaaaacaatataaaataaggaaagaatagggctcaggctcaaagctttttgcagatcataacagatacatagaattgaataagataaccctgatttctttgtgtgtctctgtgcatctgctttcttctttattttctcttatatctgtgtctgttgggtctctctatttcatggytaccttttatttgtgttacatgatactaacttttcatttataagaggaagacatacttgtaaaactgtatttcaaccaatgtgaagcttaaccaatgagaaaagccttttccctaggggctttttgtccaaaacaattacagacaaatgtttaacttcattgttgcctaaggtgatggataacagtagggacaaacaatagactcaccaaaaagtgaaaaaagaaaagctggagaatacaaaactggaaacataaaatttaattcaaagaattgtattcatgttaattataagaagagattgtttaaagaaaaagtatgaagtaaatggcgttgttagtagatacaataaaattaactgtcagcagatgtggtgaaacttatgaaggtggtatgaggatgactgagacttaaaagcaggatttgcagtcagatagacattgttcatccatgtacatgaagtgtgaccttggacaagtgccctaagttctttagatctcaactttctcatctgtaaaatggtagtcagaccatatgctacttagagtaatagtgagaattaaatgagaattgcatgtaagagatgaagccaggatgctccattactgatggcctacaaaaatcgaagttctttttgcaatactaggggcatccttagaagacttctcctaatgataaaaacaagcaagcaggattaggtcaggaaaaaaaatggtagaataaggactgtccagctatgtggtagccttgaaaaataacagcccccatttctggtgcatcacagcaaccattagatgggccagaatggagttggagttttttcaaagcttcacttatgaagaactgttattatttgagctgcccattggtcctttggaagaccctacttgtaaaactgtatttgaatcaacttgaagctcaaccaatgagaaaagccttttccctgggggtttttgtccaaaacaattacagacaaatgttttagcttcattgttgcctaaggtgatggataacagtgggacaaacaatagattcaccaaagagtgaaaaaagaaaagctggagaatccaatgtctatgggagctttaaaaaattctattgtattcctggaaatctagaaatcaacacacctaagtaaggctgtgtgctttcccagggcattgcacatgcttaggaaagatctgaggaaactctaggctcccacttctggcagactgagagttggagcatgcaggaaattaagactaaggcaggattgttaattgcctggctgagtgctaaaggtgtgccccaacacccacccaaagactgggagatttattggtttcaggcatttaaagaaatttctgtctaatcataagatgactactaagtgatgctgagtgagtaagtgatcacgcacttattcagaaggctagggtttttaggctgttattattattattgttacctcttccagctcatgcattccaaccctccccagccccttcctgccttcatctcttacctctatacccaaagtcttccctactatccactcaacatccccttctgttttatgccagggactgtgatgattccaggtgtcactcagctgacgcagarggacctcaagtaccggctgcaggcgtccagggccaagtccattatcaccagtgactccctagctccaagggtggacrccatcagcgccgaatgcccctccctcaagaccaagctgctggtgtcagacagcagtcggccaggctggttgaacttcagggaactcctccggtgaattggggctctccaggagaacagcagaaaaatgaagtcatttcccctttaagcaacaagagatgaaatgcattgctgattccacacatagagagcgaatcagagaggaacactcccattggcagccaggctgacttgagcataatcctggtccctaccttaatgttcaaggtccctcattcagtcagtgctggatttgtcagcagcttttctgtgcttcatttgcttctataatgcggtggtagttattagagctaccattcagagtacatgaaataaccaatatggtgcatttagcacatagcaggtggtcagttaataataaactagtggccatgtattgggtacttagtgtatcgctagatactgtgctatgtaagccttcaccttcattcattcatgcagcgaagatttaatgaacatctatttcacgacaagcattgtgtttggtgttcagaacaccataatggatcaaacatcatcttatttaatccctgaaaaggacattgtgatgggccctttaactcagtttttacagatgaggaaactgagacttgnnnnnnnnnnnnnnnnnnnnatttgagactttgtcctgattggaagccagaaacccaaaagagcctctcaggggcctgaaccattgagtcatgcatgctcaccccacagaccagctgcatcagattcacctgggtgctgttttgaatacagatgacaaggcctcatatctgacctacttaaccagacatagctgagcaagagccctggggatcttttttaaaaaatcagcccatagggccaggcgccatggctcacgcctgtaatcccagcacttttggaggmtgaggcaggcagatcacccgaggtcaggagtttgagaccagcctgaccaacatggagaaaccccgtctctactaaaaatacaaaattagctggatgtagtggcrcatgcctataatcccagctatttgggaggccgaggcaggagaatcacttgaacccgggargcagagkttgcagtgarccaagatcacgccattgcactccagcctgggcaacaagagcgaaacaccatctcaaaagaaaaaaaaaaatcagctcatatgattttgagagctgtcaggtgggcctagatcagtggttctcaattttggctgttactagaattactgagaagcatttaagaaaacatcaaagattctgattttattttgttcagggtggatacagacaagtttcttccaaaaatttaccaggggacttcacagtgcagccagggatgagagcccgtggattagctgatcatccagatcacagaactttgggaattacctagatctcaaaaccccatattgggggaaacctttagaaaagagttctaaattattagaaattgggatgggggtggaagctgtgcctaaatgtgcagaattatagacatggacrtgtgtgtgttctaccagaaagtcctcataccttggtaagaaagcatgggctcttttgagtgagttatgtaaccattttgagcctcagtctcctggtctgcaaaagggttataatgatagtacctgccccttgaggtggttgcagattacccaagccagagctttcagcacagcacctcgcatgtggtatttatgaaacggtagtcatattgttgttatacatattattggtgctactaactgtttttaccgtggtagtgccacctagtgtttttacgttttacagggaggcatctacagagcacaactgcgtgaggacaaagtgtcaagacccactggcyatctacttyaccagcggaaccaccggggaccccgagatggtcgagcactcccagagcagctacggactgggttttgtggccagcggaaggtaccagagcagcttgtctagagcatccaagaacagaaagtggggagtggtctggagggggtggtgtgaggggaaaggtgtcaggaactgaggtcagagagccagcagaattactgagaagccaataggagcagcttaggaaggatcttgatggttctggattttactctgagcgaggtgaaaagccacgggaggtttcttgttaaatcgtgctatatatatatatatatatacacacacacacacacacacatatatacacatacacatataaatatgtgtatgtatacatatatatacatacacataaacatatatatacatatatcataaatgtacccttttaaccattttaagtgtacagtttaatgtcattaaatacattcacattgttgtgcaaccatgatcaccatccatttccagaatttactttatctttccaaatgagaactatgcccccattacccaataacaccccattaccctctcccctcacccctggtaacctctattttactttcaatcactgtgaatttgatactataggtatttcgtgtgattggcatcatgcagtctgtccttctgttttgcaatttggcttctttcacttagcataatgtcctcaaggttcatccatgtcatagcatgtgtcaaaatttccttcccttttaagactgaaaaatattccattgtatggatagaccacattttatttattttatttttatttttatttttatttttttgagacagagttttgctcttttacccaggctggtgtgcagtggtgygatctccgctcactgtaacctctgccttctggtttcaagcgattctcttgccttagcctcccagatagctgggattacaggtgcccgccaccacacctggctaatttttgtattttcagtagagatcgggtttcaccatgttggccaggctggtcttgaactcctgacctcgtgatcctcccgcctcagcctctcaaagtgctggaattacaggcatgagccactgcacctggccgtgaccacattttaaataatccattcacctgttgatagacacttgggtagcttccacattttggctattgtcaataatgttgctataaacaatggcatgtgagtatctgttagagtctctgctttcacttcttttgggtatacacgcagaaatgaaattgctggatcatatggtaattctatgtttaattatttttgagaagtgttggatattttgagcagaggagtgacataatctaatatgttttttaaaggctcactcaggatgttgggttgacaatgaaactgtaggggaaacaggtaaaaaagatgaccagtgcattaagaggcaagcatggtagcttgccccgggagctgtagtgagggaagagatgagattctgaatgtattttcaacctagacccaataagacttgctgacagaatcagtgtggaatgagaaggaggagtcaaggagagctctaagaggaatggcctgaacaactggaagcactaaatgattggggaagaactgtgggatgagctgtctggtgggaggaaaacagagtttgtttatggagttgttaattcaagagtcttcttagacatctccatccccttgttaaaagtggagatgttgagtgggcatttggatacacatgtctgaagttaatgagaaagattcatgctgaacttatcagtgtaaagatggtatttaataccatgagatgggatgagatcagcaaagtgcaatataaactgaaaagacaatgggtctcaggaccaagtgcctgaggcatttctgcactgaaggggaagaccaggaggactcagcagaggagactgagaagggaacagccaatgaaagggggagaatgagtagtgcgtgtgtcccaggattcaagtgcatgaccgcttttctgtcttccatgtttgcagacacagtttcccattcctgggatgctcctgcttctctacctcacctrtataatccctatatattgtttatgtctaactcaagtgtcacctcctccaccacagcatttctcagaaacccatgtccatcattgctctgggttaggtgcctattctctacaattgcacaaggctttgtgtttagctctattaaaacatgctctccaggggcttcctagatatttatacttcctaaactataaggccctcaaagtaagactaatcgttcatttctagatccctagtgctaagtccagactaaatgctaaataaatgttggctaaataaagtgaccttagcacagagtattgaggttaatttttttcccttatatatcacatccactggactgtgaactttctggaaactctttttgcttctgtattcttagcctagggcataggtacatggaagatgctcaataaatgctggttgagacaatagttgacttgaaggttcttgttcaggtttcacaagtrtaagtgagtacccactgagcagggctccaaatgtggtgatatagataatacaatcctttttaaaggtagagtcattgccaagggtactgacattctctaatttttggcagatggtggttggccttgaccgaatcggacgtcttctggaacacgacagacactggctgggtgaaggcagcctggactstcttctytgcctggcctaatggatcttgcatttttgtgcatgagctgtcccgagttgatgccaaatttatcctgaatgtaagaggaaaaaccagtaataccccatatgtgttgggtacaaatgagatgagtgggatatagaatttcaggctgcaggagaaaacatataaatcagtgaatttaaggcttctttggtgtggctccctggccttccgtaatctggttcstgaccacttggttcccttcaatcattgcctatgctctagctagattcttagatgtaagactatttcgttgctatttctcctgcatggggtgcccttgtctccaccactttcttcccaatgctcctgccaaaaccctaggtatttgtcaaacccttaggcaaaatcagtctacgcctcaactccaagtgctactgtccatggtgcttaacctgagtagctggcccaactagagagtcctggtgactcctgctcagcctcccagggtcttctcatggggagggaggagattggtggccccagtcaagacacaggtcacctttcttctgccccccacatcctaactgtcattccttaaaacatcagaggttccttctgctcttattatttgtactgagataagctgtatcacatggtagctaactgcacaggctgtgccatcagtcaaagagtcagacctggactctgaacctacacctttgattcgctagctgkgtggcctkggggaagttgcctaatctcctgagctgcagtttcagcctcatctgtaagaaagggataacatatctctatagagttgctgagtgaatgaaatgatacaaggcaaaggggccagcacatcataggttattttttgaaataatttttaacttttgtggatacatagtaggtgtatatatttatggggtacatgtggtgttttgatgtaggcatgcaatgcgtgaaaatcacatcatagagaatagggtatccatcccctcaaagcatttatcttttgtgttacaatctacaytctttcagttattttaaaatgtacaattaagtttttattgactatagtcaccctgatgtgctttaaaataacaggtcttattcattcattctattattttggtaccaacwaaccatccccacctttctcccagcccccgactacccttcccagcctctggtaatcatccttctaatctctatttccatgagttcaattgttttgacttttaaatctcacaaataagtgagaatatgtgaagtttgtctttctgtgcctggcttatttcacttaacatgatgatatccagttccacccatgttattgcaaaaaacaagacctcatttttttttatggatccattgtgtatatgtacattttctttatccattmatctgttgatggacacttaggttgcttcaaaacatagtagattctttttttaaaaaaattattttcataggttattggggaacaggtggtgtttgattacatgagtaagttctttagtggtgatttgtaagattttggtgcactcatcacctgagcagtatacactgcacccaacttgaggtcttttatccctcaccccttcccacaatttcccccaagtccccaaagtccattgtgtcattcttacacctttgcatcctcatagcttagctcccacttatgagggagaacataaaatgtttggttttccatttctgagttgctttacttagaataatagtctacaatctcatccaggtccctgcgaatgccattaattcattcctttttatggccgagttgcattgcattatatatatttatataccacactttctttgtccacttgttgatttatgggcatttgggttggttccacatttttgcaattgcaaactgtgctgctataaacatgtatgtgcaagtgtctttttcatatgacttcttttcttctgggtagatactcagtagtgggattgctggatcaaatggtagttctacttttagttctttaaggaatctccacactgttttccacagtggttgtactagtttacattcctaccagcaatgtagaagtgttgcttgttcactgcatccatgccaacatctattattttttgatattttgattatggccattcttgcaggagtaagctggtatcgcatggtggaccaaatatagtagattcttaacccatattgattattatcatcatgatcaaactcatcaccatctttatccatgtagtgcttgatcagccaatgtatggaccttctccttgcactgtccccagctctgatatagtgttttcattatctattgctatgtaataaattatactgaaacttagcactataaaacacaagcatttatctcacactttctgatggtcaggaagctggaggtagcttaatgaggggttttgggagcagggtctctcatgaggttgcaatcaagaggtcagcaaggtatgctcatnnnnnnnnnnnnnnnnnnnnnnnnnnnnnnnnnnnnnnnnnnnnnnnnnnnnnnnnnnnnnnnnnnnnnnnnnnnnnnnnnnnnnnnnnnnnnnnnnnnnnnnnnnnnnnnnnnnnnnnnnnnnnnnnnnnnnnnnnnnnnnnnnnnnnnnnnnnnnnnnnnnnnnnnnnnnnnnnnnnnnnnnnnnnnnnnnnnnnnnnnnnnnnnnnnnnnnnnnnnnnnnnnnnnnnnnnnnnnnnnnnnnnnnnnnnnnnnnnnnnnnnnnnnnnnnnnnnnnnnnnnnnnnnnnnnnnnnnnnnnnnnnnnnnnnnnnnnnnnnnnnnnnnnnnnnnnnnnnnnnnnnnnnnnnnnnnnnnnnnnnnnnnnnnnnnnnnnnnnnnnnnnnnnnnnnnnnnnnnnnnnnnnnnnnnnnnnnnnnnnnnnnnnnnnnnnnnnnnnnnnnnnnnnnnnnnnnnnnnnnnnnnnnnnnnnnnnnnnnnnnnnnnnnnnnnnnnnnnnnnnnnnnnnnnnnnnnnnnnnnnnnnnnnnnnnnnnnnnnnnnnnnnnnnnnnnnnnnnnnnnnnnnnnnnnnnnnnnnnnnnnnnnnnnnnnnnnnnnnnnnnnnnnnnnnnnnnnnnnnnnnnnnnnnnnnnnnnnnnnnnnnnnnnnnnnnnnnnnnnnnnnnnnnnnngaaggagtgagcaaggaagaaaaaataaaagaaagaagggaggaagaatggagagaaatggagagaggagtaagggaaagaaagaagaaagtgagggaggagaaaaaagaggatgagagaaagagttatcaggcagggtgacagaaaggcatggcccaggaaagaagctaagtggaaaggctcttctttatctgtactgagttctccccaggttgtcatctgtgccaatccaaaaggcatgaaaatcaagtctggatccatggggaaggygtccccaccctacaatgtgcaggtagcagmctcccccaacttctggcaaggcctggcgtggagaggagaaagacacacaggcctggctggcacgggctgctgggctgctgggctgctggaggggcccagggtgtagacactcatgtatgcacctctgtgatgatctccttaccagattgtggatgatgagggcaatgtcctgcctcctggagaagaggggaatgttgccgtcgtatcagaaccacccggcccttctgtttcttcaattgctatttggtaagagacggggaacagctgttctcatgacrgtgactgtgtgctaagcattgtgcaccacactttgtaagtatctatttgtttaatccttacaatgactgcatgaggtaggttgctactattattaataaagttctgttattgataaggaagactattattaataaggaagctactacaaaggggaagtgacttatccagcatcatgcaactagtacaggcaggacatgggatttaaacgtgggtgtgtctgaaagcgtaaacatatgacatgagggcagcaccattgttttaatgaggagaaaatcgaggtacagtaaaggaaaggagcttctgaaggtcaaactgcagccgggtgcagtggctcacacctgtaatcccagcactttgggaggccgaggaaggtggatcacctgaggtcaggagttcaacaccagcctggtcagcatagtgaaaccccgtttctaccaaaaatacaaaaatcagccaggcatggtggcacacgcctctattcccagctacttgggaggctgaggcaggagaatcgcttgaacccgggaggaggaggttgnnnnnnnnnnnnnnnnnnnntacagcccatctatttcgtgctttgagggcctaagtatgtgaatatatagcatgggtatccacacacacaactaccctctcattccaactctctttctttctctgtctccccctctatatatttttctgcctctctctttgtctctctctcccacacacatttatacacatacacattgacaagtcaacatacctgtaaatctcacagatgcccctcaagaacaagcttctggccccccaaaatttgcatccagatggaactaaatagatttaaggcagactgaaattttagcacctgagataggcttctcctcacaccatacacccatgggctattctgtcagcagtgtgtctgctacttctgtgagggaagagaaatgattggacaattgttagccacctatggagtgcggtttgtggccagggccctcaggtgtggtgaaactaacaagcccgcaccacagtagatgccccaactctcagcctcagagtaaccccagccaactgttctctgagcacatgtcattggacacccaagagaaagggacaaggcactgatgatggctccatcctgggtgaagccaaagcaacatcttctagcagaacagggctagttgctggggtatatggagagaggcccaccatccttcagtatccaccaaccctgatctgttctccctcttttgtcctcccccaagtcatgaggagtcgtcctttcttctttcctaatcacatgaatctacccaccaagtgtccaaaagagggagttcttacatgtttctaaaagtgaattcttctccaatgtaagaaaatcatcccattcattgatctgatgtgtgcatctccacatgatgattttggctgaaagcaagctccaagtacctcgttaagaacaatgtcgttgaatgctctttggtaataataagtaacttaatcaagccaatttgatctcccctctcctccaagattaaaaatgtacttacaatcactgatttttttttaatagtttggatgatttgttgaacagagagggcattttgcaacataattaatatctgtaggaatttttgggattcttaggggtctaatttttatcttttcaattttcttttctttcctttcttttcctttttcttttatttttatttatttatttattttagagacagagtcttgctctgttgcccaggctggagtgcagtggcatgatctcggcttactgcaacatccgcctcccaggttccagctttcctcccacctcaaccttccaagtagctgggactacaggcatgtgccaccatacctggctaagttttagtactttttggtagagacggggttttaccacgttgaccaggctggtcttcaactcctgagatcatgcaatctgcccacctaggcctcccaaagtgctgggactacaggtgtgagccatggtgcctggcctatcttttcaatttctaattgatctatccttttcaatcagattactgtcctaaccaatttattatcagtttttttccaactaaattattttggccaagttacctggaactcaccatattatgccaaaacctattatatgagcttctgattttatctcaaactcagatgggatggatcttttaaaaattatctgtccatgaggagcatggttgcaaagccagtgggtggactcacttagagaagattaaaaagcaggggcatctacctctagtgcctgtggtgtttgcatctgggcagtggcaccagagggcggggtggtatgaagatcctgacataggtggccttgttttcctgtctgagaaaggtaccagtttcagagcctgaggcactgtctgaccggaggagaggccctcaaccctgacgtgagggagaagtggaaacaccagaccggtgtggagctgtacgaaggctatggccagtctgaaacggtgagtgctggaggggccaggtccctaccccccaggtcccctcgagagcttcctgcctctccggctgtcacctccctgaagcttctcagggaccacccttcccccaggggagaagctgataacaaaattccatcagctttccttcccttttgatttccatatgttctcacttataagtgggagctaagctatgaggatgcaaagacatacagagtggtataaaagactttggagactcagaaggaagaaggtgagaggaggggcgtgaaggtaaaaaaactacgtattgggtataatgtacactactcagcttacagatgcactaaaatctcaggattcaccactatagaattcatccatgttacaaaaaaacgctcgaacccaaaaagctattgaaatacacacacacacacacacacacacacacacacacactacttataaattaaaannnnnnnnnnnnnnnnnnnnnnnnnnnnnnnnnnnnnnnnnnnnnnnnnnnnnnnnnnnnnnnnnnnnnnnnnnnnnnnnnnnnnnnnnnnnnnnnnnnnnnnnnnnnnnnnnnnnnnnnnnnnnnnnnnnnnnnnnnnnnnnnnnnnnnnnnnnnnnnnnnnnnnnnnnnnnnnnnnnnnnnnnnnnnnnnnnnnnnnnnnnnnnnnnnnnnnnnnnnnnnnnnnnnnnnnnnnnnnnnnnnnnnnnnnnnnnnnnnnnnnnnnnnnnnnnnnnnnnnnnnnnnnnnnnnnnnnnnnnnnnnnnnnnnnnnnnnnnnnnnnnnnnnnnnnnnnnnnnnnnnnnnnnnnnnnnnnnnnnnnnnnnnnnnnnnnnnnnnnnnnnnnnnnnnnnnnnnnnnnnnnnnnnnnnnnnnnnnnnnnnnnnnnnnnnnnnnnnnnnnnnnnnnnnnnnnnnnnnnnnnnnnnnnnnnnnnnnnnnnnnnnnnnnnnnnnnnnnnnnnnnnnnnnnnnnnnnnnnnnnnnnnnnnnnnnnnnnnnnnnnnnnnnnnnnnnnnnnnnnnnnnnnnnnnnnnnnnnnnnnnnnnnnnnnnnnnnnnnnnnnnnnnnnnnnnnnnnnnnnnnnnnnnnnnnnnnnnnnnnnnnnnnnnnnnnnnnnnnnnnnnnnnnnnnnnnnnnnnnnnnnnnnnnnnnnnnnnnnnnnnnnnnnnnnnnnnnnnnnnnnnnnnnnnnnnnnnnnnnnnnnnnnnnnnnnnnnnnnnnnnnnnnnnnnnnnnnnnnnnnnnnnnnnnnnnnnnnnnnnnnnnnnnnnnnnnnnnnnnnnnnnnnnnnnnnnnnnnnnnnnnnnnnnnnnnnnnnnnnnnnnnnnnnnnnnnnnnnnnnnnnnnnnnnnnnnnnnnnnnnnnnnnnnnnnnnnnnnnnnnnnnnnnnnnnnnnnnnnnnnnnnnnnnnnnnnnnnnnnnnnnnnnnnnnnnnnnnnnnnnnnnnnnnnnnnnnnnnnnnnnnnnnnnnnnnnnnnnnnnnnnnnnnnnnnnnnnnnnnnnnnnnnnnnnnnnnnnnnnnnnnnnnnnnnnnnnnnnnnnnnnnnnnnnnnnnnnnnnnnnnnnnnnnnnnnnnnnnnnnnnnnnnnnnnnnnnnnnnnnnnnnnnnnnnnnnnnnnnnnnnnnnnnnnnnnnnnnnnnnnnnnnnnnnnnnnnnnnnnnnnnnnnnnnnnnnnnnnnnnnnnnnnnnnnnnnnnnnnnnnnnnnnnnnnnnnnnnnnnnnnnnnnnnnnnnnnnnnnnnnnnnnnnnnnnnnnnnnnnnnnnnnnnnnnnnnnnnnnnnnnnnnnnnnnnnnnnnnnnnnnnnnnnnnnnnnnnnnnnnnnnnnnnnnnnnnnnnnnnnnnnnnnnnnnnnnnnnnnnnnnnnnnnnnnnnnnnnnnnnnnnnnnnnnnnnnnnnnnnnnnnnnnnnnnnnnnnnnnnnnnnnnnnnnnnnnnnnnnnnnnnnnnnnnnnnnnnnnnnnnnnnnnnnnnnnnnnnnnnnnnnnnnnnnnnnnnnnnnnnnnnnnnnnnnnnnnnnnnnnnnnnnnnnnnnnnnnnnnnnnnnnnnnnnnnnnnnnnnnnnnnnnnnnnnnnnnnnnnnnnnnnnnnnnnnnnnnnnnnnnnnnnnnnnnnnnnnnnnnnnnnnnnnnnnnnnnnnnnnnnnnnnnnnnnnnnnnnnnnnnnnnnnnnnnnnnnnnnnnnnnnnnnnnnnnnnnnnnnnnnnnnnnnnnnnnnnnnnnnnnnnnnnnnnnnnnnnnnnnnnnnnnnnnnnnnnnnnnnnnnnnnnnnnnnnnnnnnnnnnnnnnnnnnnnnnnnnnnnnnnnnnnnnnnnnnnnnnnnnnnnnnnnnnnnnnnnnnnnnnnnnnnnnnnnnnnnnnnnnnnnnnnnnnnnnnnnnnnnnnnnnnnnnnnnnnnnnnnnnnnnnnnnnnnnnnnnnnnnnnnnnnnnnnnnnnnnnnnnnnnnnnnnnnnnnnnnnnnnnnnnnnnnnnnnnnnnnnnnnnnnnnnnnnnnnnnnnnnnnnnnnnnnnnnnnnnnnnnnnnnnnnnnnnnnnnnnnnnnnnnnnnnnnnnnnnnnnnnnnnnnnnnnnnnnnnnnnnnnnnnnnnnnnnnnnnnnnnnnnnnnnnnnnnnnnnnnnnnnnnnnnnnnnnnnnnnnnnnnnnnnnnnnnnnnnnnnnnnnnnnnnnnnnnnnnnnnnnnnnnnnnnnnnnnnnnnnnnnnnnnnnnnnnnnnnnnnnnnnnnnnnnnnnnnnnnnnnnnnnnnnnnnnnnnnnnnnnnnnnnnnnnnnnnnnnnnnnnnnnnnnnnnnnnnnnnnnnnnnnnnnnnnnnnnnnnnnnnnnnnnnnnnnnnnnnnnnnnnnnnnnnnnnnnnnnnnnnnnnnnnnnnnnnnnnnnnnnnnnnnnnnnnnnnnnnnnnnnnnnnnnnnnnnnnnnnnnnnnnnnnnnnnnnnnnnnnnnnnnnnnnnnnnnnnnnnnnnnnnnnnnnnnnnnnnnnnnnnnnnnnnnnnnnnnnnnnnnnnnnnnnnnnnnnnnnnnnnnnnnnnnnnnnnnnnnnnnnnnnnnnnnnnnnnnnnnnnnnnnnnnnnnnnnnnnnnnnnnnnnnnnnnnnnnnnnnnnnnnnnnnnnnnnnnnnnnnnnnnnnnnnnnnnnnnnnnnnnnnnnnnnnnnnnnnnnnnnnnnnnnnnnnnnnnnnnnnnnnnnnnnnnnnnnnnnnnnnnnnnnnnnnnnnnnnnnnnnnnnnnnnnnnnnnnnnnnnnnnnnnnnnnnnnnnnnnnnnnnnnnnnnnnnnnnnnnnnnnnnnnnnnnnnnnnnnnnnnnnnnnnnnnnnnnnnnnnnnnnnnnnnnnnnnnnnnnnnnnnnnnnnnnnnnnnnnnnnnnnnnnnnnnnnnnnnnnnnnnnnnnnnnnnnnnnnnnnnnnnnnnnnnnnnnnnnnnnnnnnnnnnnnnnnnnnnnnnnnnnnnnnnnnnnnnnnnnnnnnnnnnnnnnnnnnnnnnnnnnnnnnnnnnnnnnnnnnnnnnnnnnnnnnnnnnnnnnnnnnnnnnnnnnnnnnnnnnnnnnnnnnnnnnnnnnnnnnnnnnnnnnnnnnnnnnnnnnnnnnnnnnnnnnnnnnnnnnnnnnnnnnnnnnnnnnnnnnnnnnnnnnnnnnnnnnnnnnnnnnnnnnnnnnnnnnnnnnnnnnnnnnnnnnnnnnnnnnnnnnnnnnnnnnnnnnnnnnnnnnnnnnnnnnnnnnnnnnnnnnnnnnnnnnnnnnnnnnnnnnnnnnnnnnnnnnnnnnnnnnnnnnnnnnnnnnnnnnnnnnnnnnnnnnnnnnnnnnnnnnnnnnnnnnnnnnnnnnnnnnnnnnnnnnnnnnnnnnnnnnnnnnnnnnnnnnnnnnnnnnnnnnnnnnnnnnnnnnnnnnnnnnnnnnnnnnnnnnnnnnnnnnnnnnnnnnnnnnnnnnnnnnnnnnnnnnnnnnnnnnnnnnnnnnnnnnnnnnnnnnnnnnnnnnnnnnnnnnnnnnnnnnnnnnnnnnnnnnnnnnnnnnnnnnnnnnnnnnnnnnnnnnnnnnnnnnnnnnnnnnnnnnnnnnnnnnnnnnnnnnnnnnnnnnnnnnnnnnnnnnnnnnnnnnnnnnnnnnnnnnnnnnnnnnnnnnnnnnnnnnnnnnnnnnnnnnnnnnnnnnnnnnnnnnnnnnnnnnnnnnnnnnnnnnnnnnnnnnnnnnnnnnnnnnnnnnnnnnnnnnnnnnnnnnnnnnnnnnnnnnnnnnnnnnnnnnnnnnnnnnnnnnnnnnnnnnnnnnnnnnnnnnnnnnnnnnnnnnnnnnnnnnnnnnnnnnnnnnnnnnnnnnnnnnnnnnnnnnnnnnnnnnnnnnnnnnnnnnnnnnnnnnnnnnnnnnnnnnnnnnnnnnnnnnnnnnnnnnnnnnnnnnnnnnnnnnnnnnnnnnnnnnnnnnnnnnnnnnnnnnnnnnnnnnnnnnnnnnnnnnnnnnnnnnnnnnnnnnnnnnnnnnnnnnnnnnnnnnnnnnnnnnnnnnnnnnnnnnnnnnnnnnnnnnnnnnnnnnnnnnnnnnnnnnnnnnnnnnnnnnnnnnnnnnnnnnnnnnnnnnnnnnnnnnnnnnnnnnnnnnnnnnnnnnnnnnnnnnnnnnnnnnnnnnnnnnnnnnnnnnnnnnnnnnnnnnnnnnnnnnnnnnnnnnnnnnnnnnnnnnnnnnnnnnnnnnnnnnnnnnnnnnnnnnnnnnnnnnnnnnnnnnnnnnnnnnnnnnnnnnnnnnnnnnnnnnnnnnnnnnnnnnnnnnnnnnnnnnnnnnnnnnnnnnnnnnnnnnnnnnnnnnnnnnnnnnnnnnnnnnnnnnnnnnnnnnnnnnnnnnnnnnnnnnnnnnnnnnnnnnnnnnnnnnnnnnnnnnnnnnnnnnnnnnnnnnnnnnnnnnnnnnnnnnnnnnnnnnnnnnnnnnnnnnnnnnnnnnnnnnnnnnnnnnnnnnnnnnnnnnnnnnnnnnnnnnnnnnnnnnnnnnnnnnnnnnnnnnnnnnnnnnnnnnnnnnnnnnnnnnnnnnnnnnnnnnnnnnnnnnnnnnnnnnnnnnnnnnnnnnnnnnnnnnnnnnnnnnnnnnnnnnnnnnnnnnnnnnnnnnnnnnnnnnnnnnnnnnnnnnnnnnnnnnnnnnnnnnnnnnnncttttaaatggacacaactacatcccagagaggctggctatggggcaggagatcttagggggaggtgcaggctctgttatccatcctgtctaataaaaagtcttttctatttgcagatgaggacatagcaagcacaccagtaatagttgctgatggctgtaacctaagagggatagaatatgtatccaaaatgacctacatataccagaaagatgggccaaatttaataagctgggctttcataggagaaatccttttttttttttgagatggagtcttgctgtgttgtccaggctgaagtgcagtggcatgatcttggctcactgcaacctccgcctcccaggttcaagtgatcttctgatcttcctgcctcagccccccgccaccagtagctgggattacaggcacatgtcaccacacctggctaatttttgtatttttagtagagacagggttttgccttgttggccaggctggaggtcttaaactcctgacctcaggtgatccacccaccccggcctcccaaagtgctgggattacaggtgtgagtcaccgtgcccggccaggaggtctttctgtgggtcccagaagaatgcatattatgggaaagatcaggttccaggcagacttaggtacttttcactggcttacatccaacataatcctaaagcacaacggttaccttttgaaagttagtgcaacatcagcctgcattctcagaagcaccaggaccgcaggagagattctcaaagtctggttcttggactgcttgcaactgtatcatctgagattcttgtttaaaatatagatttgtagacctaaagtcagacttaccaaatcatgatgactgggaatgcagcccagagaatctgcattttagccagccattcttggccaagtgattcccctctaaaatccaaagccattaatgtataataagggaggtgtggagtcccattgatgtgctgaagaaatctacctcaaacgtatgcctagttctgcatgccgtgagttaactgggactgtgacaaatggctgtgtgctcaaacttaatccatgtatagtgcttagaactgagtctggtgtgtagaaagtgcccaacacataagccggwcacggtggctcacgtctgtaatcccagcactttgggaggccgaggcgggtggatcacgaggtcaggagatcgaggccatcctggctaacayggtgaaaccccatctctactaaaaatactaaaaattagcckggcgtggcggtgggcgcctatagtcccagctactcaggaggctgaggcaggagaatggcgtgaacccaggaggcagagcttgcagtaagccgagatcacctcactgagctccagcctgggcgacagggtgagactctgtctcaaaaaaaaaaaaaaagtgtccaacaaatgtttcgtagttacagtagtaagagtaagaggaagctctttctaaaagcatatctgtctgaacatgaaatgatagtggccttcctccctgtgggaagtatgcaagggacagtgagctacccctttaatagaatactgttaacagataggaatgctggaattaataagcatccaagtgaccttccattcctaacagaaactatgtttgttgtgcttgagtctgggacacttcctcctgcctggcataagacagcctgcaggaaagttgtgggcagagagacccaaggtgcagagtgtccctcgggatgtctggaacagaagtggtgcagttcagggtctgctgattgcaaatgttcatccatgcagacccccaaagacctagttccccttgcaagtgcctgcattttcctcaatcccacctgttcaaactcatgcctacctacctttctcattaggaaaatctggaagaaaatggccctaggagtttatgaacctcttttctccaaaatatttgcttcttaagagaagcgatgttggcttcaaatggtgtcattccaagtatggggagtaatttgagaaataggtaggagtttgaaatcatcccagaaaggtcaatcctcctaatagtcacacctggaagggccagcaaaagaaaaattgatgttgtttgtgtcactggctgtgcccaaaaaaaactagtagaactttcatggtgcaaaggtaaatgtaggcacttattcaaggctcacttaaggagaaaagagttgttatacgaggcctgatcttttctgggtattttgttttcctgcaggtggtaaaggcatttatagtccttactccagcctactcctctcatgacccagaggcactaacgcgggaactccaggagcatgtgaaaagggtgactgctccatacaaataccccaggaaggtaaatatcagggtttccagggcacagtgatctgggaatcagatgggcacgctctgcctgggctcccactcagagccaggccctgtgccaggcactggggatatggagaaacttgtaaccctggctgctgcttcagcttttttctgtatttcttcacttgggttctcctcaaagcacattttgttcctgctctaagaacagcctgatccctaccacaaatcagatacaagaggtagtgctcaaatgctgtcaaaatgatcctgtgctccaggctccagctgttttgcttctggccatttagggggaaaccctgaatcagggacgctttccaaggacaggcagacagtattgtctctttcaaaacaaaagtctttttgagaaatgatgatttccaagtgttttttgttttgtgtttggtcactaggtggcctttgtttcagaactgccaaagacggtttctggaaagatccaaaggagtaaattgcgaagtcaggagtgggggaaatgaggtgcaaccccaggaaggccccgtagacctcctaagagtccacgagaaactaatggatcactggtcagcccccatggggagcatcatctcttcaaccctaaagatgtcaaaggtgtgcagcttccaaatggcatccccaggatcactgggcaatgccggaaagagcaaaagaatatcactggccctgaccacatagatgctgcgcckcctagcaaatgcttggtggttcgacttctccctctgtctgggggcaggctcagcatctgcccactggtctcactaagagctttcagatttccctccacaggacaggttaccatagacttggggcacttgtgggtactcattctctgccagtgggaatgtaaagctttcatcctttgtatgcaaccatttggtaaaaatatgcaggaacgtaaaataaaatatcctttagctcagaaattctacctttgggagtcaccacaaaagaaaaaatcaaaatgcagaaaatgtgtggtgcactaagatgatcacacagcattaaaactaaaaaaaaaaaaaattaacaattaacatccaaacaacaaggaaatgattaacaaaattgtagtagattaactcaataacatatgatgtggccactaaaatatttragagcagtttagtatgtcttgggaaaagtgtaagctatattaattttaaaaatcagaataaaaatatttgcatactggagaatcccaactctgaaaaataaagggaaaactgtagttaattgtaattttcctggagattgaggagggagggagagaaaataatgsatggtagtttttcttcttcctttttcactacatttctgtattttccaagtttttgtactaagcacatataactattttaatgaaaaagttatgttaaagaaagcatactctgcttcatgtctagttcttcctccacatactcatacatcaaccccaaagactgctgtattatgtctgtattagtcagcattctccagagaaggagaagcaataggacatatatagacayaggagaggggatttatgatgggaattggctcactcgattttggaggctgagaagttccacaatctaccatctgcatgctggagayccaggaaaccccgtggtataattccatctgagtccaaaggcctgaaaaccagaagagccaatgttataactccctgtccgagtgcaaagtatcgagaaccaggagcttcactgcctgaggacaagaaaacacagatgttctagcccaaaaggaaggagcaaattcctcttttctcctttttctcctcttcatgccctaatggattggatgatgcctgcccacgtgggtgagggcagattttcttagtctatggctctatctctaatatcacctggaaacacctcccagagacacccagaagtaatgttcacagctatctggggactcttaacccagtcaagttgacacctaacattaaccgtcacaatgtcttatccaggaggggcataaagacgtgcagccacagctcaggcctgcaaacaggaaagggtggttctgggagcaaccctggaggaaaagcagcagatggaaactgaagcaatcccagtgctgctgaccccacccccagcacctccacaccctccagggaaaattcagtnnnnnnnnnnnnnnnnnnnnnnnnnnnnnnnnnnnnnnnnnnnnnnnnnnnnnnnnnnnnnnnnnnnnnnnnnnnnnnnnnnnnnnnnnnnnnnnnnnnnnnnnnnnnnnnnnnnnnnnnnnnnnnnnnnnnnnnnnnnnnnnnnnnnnnnnnnnnnnnnnnnnnnnnnnnnnnnnnnnnnnnnnnnnnnnnnnnnnnnnnnnnnnnnnnnnnnnnnnnnnnnnnnnnnnnnnnnnnnnnnnnnnnnnnnnnnnnnnnnnnnnnnnnnnnnnnnnnnnnnnnnnnnnnnnnnnnnnnnnnnnnnnnnnnnnnnnnnnnnnnnnnnnnnnnnnnnnnnnnnnnnnnnnnnnnnnnnnnnnnnnnnnnnnnnnnnnnnnnnnnnnnnnnnnnnnnnnnnnnnnnnnnnnnnnnnnnnnnnnnnnnnnnnnnnnnnnnnnnnnnnnnnnnnnnnnnnnnnnnnnnnnnnnnnnnnnnnnnnnnnnnnnnnnnnnnnnnnnnnnnnnnnnnnnnnnnnnnnnnnnnnnnnnnnnnnnnnnnnnnnnnnnnnnnnnnnnnnnnnnnnnnnnnnnnnnnnnnnnnnnnnnnnnnnnnnnnnnnnnnnnnnnnnnnnnnnnnnnnnnnnnnnnnnnnnnnnnnnnnnnnnnnnnnnnnnnnnnnnnnnnnnnnnnnnnnnnnnnnnnnnnnnnnnnnnnnnnnnnnnnnnnnnnnnnnnnnnnnnnnnnnnnnnnnnnnnnnnnnnnnnnnnnnnnnnnnnnnnnnnnnnnnnnnnnnnnnnnnnnnnnnnnnnnnnnnnnnnnnnnnnnnnnnnnnnnnnnnnnnnnnnnnnnnnnnnnnnnnnnnnnnnnnnnnnnnnnnnnnnnnnnnnnnnnnnnnnnnnnnnnnnnnnnnnnnnnnnnnnnnnnnnnnnnnnnnnnnnnnnnnnnnnnnnnnnnnnnnnnnnnnnnnnnnnnnnnnnnnnnnnnnnnnnnnnnnnnnnnnnnnnnnnnnnnnnnnnnnnnnnnnnnnnnnnnnnnnnnnnnnnnnnnnnnnnnnnnnnnnnnnnnnnnnnnnnnnnnnnnnnnnnnnnnnnnnnnnnnnnnnnnnnnnnnnnnnnnnnnnnnnnnnnnnnnnnnnnnnnnnnnnnnnnnnnnnnnnnnnnnnnnnnnnnnnnnnnnnnnnnnnnnnnnnnnnnnnnnnnnnnnnnnnnnnnnnnnnnnnnnnnnnnnnnnnnnnnnnnnnnnnnnnnnnnnnnnnnnnnnnnnnnnnnnnnnnnnnnnnnnnnnnnnnnnnnnnnnnnnnnnnnnnnnnnnnnnnnnnnnnnnnnnnnnnnnnnnnnnnnnnnnnnnnnnnnnnnnnnnnnnnnnnnnnnnnnnnnnnnnnnnnnnnnnnnnnnnnnnnnnnnnnnnnnnnnnnnnnnnnnnnnnnnnnnnnnnnnnnnnnnnnnnnnnnnnnnnnnnnnnnnnnnnnnnnnnnnnnnnnnnnnnnnnnnnnnnnnnnnnnnnnnnnnnnnnnnnnnnnnnnnnnnnnnnnnnnnnnnnnnnnnnnnnnnnnnnnnnnnnnnnnnnnnnnnnnnnnnnnnnnnnnnnnnnnnnnnnnnnnnnnnnnnnnnnnnnnnnnnnnnnnnnnnnnnnnnnnnnnnnnnnnnnnnnnnnnnnnnnnnnnnnnnnnnnnnnnnnnnnnnnnnnnnnnnnnnnnnnnnnnnnnnnnnnnnnnnnnnnnnnnnnnnnnnnnnnnnnnnnnnnnnnnnnnnnnnnnnnnnnnnnnnnnnnnnnnnnnnnnnnnnnnnnnnnnnnnnnnnnnnnnnnnnnnnnnnnnnnnnnnnnnnnnnnnnnnnnnnnnnnnnnnnnnnnnnnnnnnnnnnnnnnnnnnnnnnnnnnnnnnnnnnnnnnnnnnnnnnnnnnnnnnnnnnnnnnnnnnnnnnnnnnnnnnnnnnnnnnnnnnnnnnnnnnnnnnnnnnnnnnnnnnnnnnnnnnnnnnnnnnnnnnnnnnnnnnnnnnnnnnnnnnnnnnnnnnnnnnnnnnnnnnnnnnnnnnnnnnnnnnnnnnnnnnnnnnnnnnnnnnnnnnnnnnnnnnnnnnnnnnnnnnnnnnnnnnnnnnnnnnnnnnnnnnnnnnnnnnnnnnnnnnnnnnnnnnnnnnnnnnnnnnnnnnnnnnnnnnnnnnnnnnnnnnnnnnnnnnnnnnnnnnnnnnnnnnnnnnnnnnnnnnnnnnnnnnnnnnnnnnnnnnnnnnnnnnnnnnnnnnnnnnnnnnnnnnnnnnnnnnnnnnnnnnnnnnnnnnnnnnnnnnnnnnnnnnnnnnnnnnnnnnnnnnnnnnnnnnnnnnnnnnnnnnnnnnnnnnnnnnnnnnnnnnnnnnnnnnnnnnnnnnnnnnnnnnnnnnnnnnnnnnnnnnnnnnnnnnnnnnnnnnnnnnnnnnnnnnnnnnnnnnnnnnnnnnnnnnnnnnnnnnnnnnnnnnnnnnnnnnnnnnnnnnnnnnnnnnnnnnnnnnnnnnnnnnnnnnnnnnnnnnnnnnnnnnnnnnnnnnnnnnnnnnnnnnnnnnnnnnnnnnnnnnnnnnnnnnnnnnnnnnnnnnnnnnnnnnnnnnnnnnnnnnnnnnnnnnnnnnnnnnnnnnnnnnnnnnnnnnnnnnnnnnnnnnnnnnnnnnnnnnnnnnnnnnnnnnnnnnnnnnnnnnnnnnnnnnnnnnnnnnnnnnnnnnnnnnnnnnnnnnnnnnnnnnnnnnnnnnnnnnnnnnnnnnnnnnnnnnnnnnnnnnnnnnnnnnnnnnnnnnnnnnnnnnnnnnnnnnnnnnnnnnnnnnnnnnnnnnnnnnnnnnnnnnnnnnnnnnnnnnnnnnnnnnnnnnnnnnnnnnnnnnnnnnnnnnnnnnnnnnnnnnnnnnnnnnnnnnnnnnnnnnnnnnnnnnnnnnnnnnnnnnnnnnnnnnnnnnnnnnnnnnnnnnnnnnnnnnnnnnnnnnnnnnnnnnnnnnnnnnnnnnnnnnnnnnnnnnnnnnnnnnnnnnnnnnnnnnnnnnnnnnnnnnnnnnnnnnnnnnnnnnnnnnnnnnnnnnnnnnnnnnnnnnnnnnnnnnnnnnnnnnnnnnnnnnnnnnnnnnnnnnnnnnnnnnnnnnnnnnnnnnnnnnnnnnnnnnnnnnnnnnnnnnnnnnnnnnnnnnnnnnnnnnnnnnnnnnnnnnnnnnnnnnnnnnnnnnnnnnnnnnnnnnnnnnnnnnnnnnnnnnnnnnnnnnnnnnnnnnnnnnnnnnnnnnnnnnnnnnnnnnnnnnnnnnnnnnnnnnnnnnnnnnnnnnnnnnnnnnnnnnnnnnnnnnnnnnnnnnnnnnnnnnnnnnnnnnnnnnnnnnnnnnnnnnnnnnnnnnnnnnnnnnnnnnnnnnnnnnnnnnnnnnnnnnnnnnnnnnnnnnnnnnnnnnnnnnnnnnnnnnnnnnnnnnnnnnnnnnnnnnnnnnnnnnnnnnnnnnnnnnnnnnnnnnnnnnnnnnnnnnnnnnnnnnnnnnnnnnnnnnnnnnnnnnnnnnnnnnnnnnnnnnnnnnnnnnnnnnnnnnnnnnnnnnnnnnnnnnnnnnnnnnnnnnnnnnnnnnnnnnnnnnnnnnnnnnnnnnnnnnnnnnnnnnnnnnnnnnnnnnnnnnnnnnnnnnnnnnnnnnnnnnnnnnnnnnnnnnnnnnnnnnnnnnnnnnnnnnnnnnnnnnnnnnnnnnnnnnnnnnnnnnnnnnnnnnnnnnnnnnnnnnnnnnnnnnnnnnnnnnnnnnnnnnnnnnnnnnnnnnnnnnnnnnnnnnnnnnnnnnnnnnnnnnnnnnnnnnnnnnnnnnnnnnnnnnnnnnnnnnnnnnnnnnnnnnnnnnnnnnnnnnnnnnnnnnnnnnnnnnnnnnnnnnnnnnnnnnnnnnnnnnnnnnnnnnnnnnnnnnnnnnnnnnnnnnnnnnnnnnnnnnnnnnnnnnnnnnnnnnnnnnnnnnnnnnnnnnnnnnnnnnnnnnnnnnnnnnnnnnnnnnnnnnnnnnnnnnnnnnnnnnnnnnnnnnnnnnnnnnnnnnnnnnnnnnnnnnnnnnnnnnnnnnnnnnnnnnnnnnnnnnnnnnnnnnnnnnnnnnnnnnnnnnnnnnnnnnnnnnnnnnnnnnnnnnnnnnnnnnnnnnnnnnnnnnnnnnnnnnnnnnnnnnnnnnnnnnnnnnnnnnnnnnnnnnnnnnnnnnnnnnnnnnnnnnnnnnnnnnnnnnnnnnnnnnnnnnnnnnnnnnnnnnnnnnnnnnnnnnnnnnnnnnnnnnnnnnnnnnnnnnnnnnnnnnnnnnnnnnnnnnnnnnnnnnnnnnnnnnnnnnnnnnnnnnnnnnnnnnnnnnnnnnnnnnnnnnnnnnnnnnnnnnnnnnnnnnnnnnnnnnnnnnnnnnnnnnnnnnnnnnnnnnnnnnnnnnnnnnnnnnnnnnnnnnnnnnnnnnnnnnnnnnnnnnnnnnnnnnnnnnnnnnnnnnnnnnnnnnnnnnnnnnnnnnnnnnnnnnnnnnnnnnnnnnnnnnnnnnnnnnnnnnnnnnnnnnnnnnnnnnnnnnnnnnnnnnnnnnnnnnnnnnnnnnnnnnnnnnnnnnnnnnnnnnnnnnnnnnnnnnnnnnnnnnnnnnnnnnnnnnnnnnnnnnnnnnnnnnnnnnnnnnnnnnnnnnnnnnnnnnnnnnnnnnnnnnnnnnnnnnnnnnnnnnnnnnnnnnnnnnnnnnnnnnnnnnnnnnnnnnnnnnnnnnnnnnnnnnnnnnnnnnnnnnnnnnnnnnnnnnnnnnnnnnnnnnnnnnnnnnnnnnnnnnnnnnnnnnnnnnnnnnnnnnnnnnnnnnnnnnnnnnnnnnnnnnnnnnnnnnnnnnnnnnnnnnnnnnnnnnnnnnnnnnnnnnnnnnnnnnnnnnnnnnnnnnnnnnnnnnnnnnnnnnnnnnnnnnnnnnnnnnnnnnnnnnnnnnnnnnnnnnnnnnnnnnnnnnnnnnnnnnnnnnnnnnnnnnnnnnnnnnnnnnnnnnnnnnnnnnnnnnnnnnnnnnnnnnnnnnnnnnnnnnnnnnnnnnnnnnnnnnnnnnnnnnnnnnnnnnnnnnnnnnnnnnnnnnnnnnnnnnnnnnnnnnnnnnnnnnnnnnnnnnnnnnnnnnnnnnnnnnnnnnnnnnnnnnnnnnnnnnnnnnnnnnnnnnnnnnnnnnnnnnnnnnnnnnnnnnnnnnnnnnnnnnnnnnnnnnnnnnnnnnnnnnnnnnnnnnnnnnnnnnnnnnnnnnnnnnnnnnnnnnnnnnnnnnnnnnnnnnnnnnnnnnnnnnnnnnnnnnnnnnnnnnnnnnnnnnnnnnnnnnnnnnnnnnnnnnnnnnnnnnnnnnnnnnnnnnnnnnnnnnnnnnnnnnnnnnnnnnnnnnnnnnnnnnnnnnnnnnnnnnnnnnnnnnnnnnnnnnnnnnnnnnnnnnnnnnnnnnnnnnnnnnnnnnnnnnnnnnnnnnnnnnnnnnnnnnnnnnnnnnnnnnnnnnnnnnnnnnnnnnnnnnnnnnnnnnnnnnnnnnnnnnnnnnnnnnnnnnnnnnnnnnnnnnnnnnnnnnnnnnnnnnn

SEQ ID NO: 94196 - DNA, 12883 bp, Homo sapiens
gcccagcccaattctgattactttcatgtgtttgaaattctccatgaaaatttcaaaatagatgtgataaggaaacacccatcaggccgggtgtggtggcccacgcctgtaatcctagcactttgggaggctgaggcgggtggatcacctggggtcgggagttcgagaccagcctgaccaacaggggaaaccccgtctctactaaaaatacaaaattagccaggcgtggtggcgcatgcctgtaatcccagctacttgggaggctgaggcaggagaatcacttaaacttgggaggcagaggttgcagtgagccaagattgcgctattgcactccagcctgggcaacaagagtgaaactccatctcaaaacaatacaaaaacaacaacaacaacaacaacaaaaacccacaatctgttttttcaactacactcctctgtaccttggaaactctgagatgcgacaatccctgcctccacacctccttgccccatccaagcctctgggaagtgtggaagaggcagtgctggcaaggtgagggggagacagaagtcagggagatgggtgaagacagcaggcctcctggatcagcctcaacccagggacatccttgacccactcacttcccaggacagacacttgatgacatcggattcaaggaagcagccagtggcgtggacaggcccacatgaggaagctagagtcctgggtctgggcctcagctctacctgtgggctttcatctccccaccagtaagtaccatgggggcatggaagtggattatctttggggccccgccaattaattctgtctttcagggaccatgcagactttcagacccagccttacccggaaggagccccagaggaagacacggccatcatcggtgagggctgctgtgtgactgtctcctgctgacacctgtaccaccttctcttgcagctccactttcccagggaccatctccgagccctccactgatgtgtcccttcccagggcaccctcatcattgcagccgaaggaatagacctgtgcccaggatgccctcattaatgcaacgtctggcctcgcagtccattctcatgtaggccactccccacttgactagccagctccatttccacagtgaacatgcgtggttcaaaagccctgccccaagccacccaaccccaggccttgtccaaccctgtgccagtccccaacacctacctggccacttttgcttagacacacggtgtgcatgcccccagcctcagcctgcacaacatcctccggaatggataccagggccggcttcttcctctccatcacattctcacccagccccagctggcccacgtcgccctggcctagtgtcagcaccaagccgggttctgtgctgtgggacctgtgtgagactgaagggtgaagaagatagaccctgagtgtagaggatgacgacagcgaggagaggtcacaggctctgggatcagacaaacctgtgcagaagcccctgctctgccacagactgttagtatgaactttctaagttttgtcatctgtgaaatggggacaacaaaagtacctctctcacaggatttttgtggagattaagaactgagcacattattcacgtgaaaggggagaaagggaaacaaggagacactggatactgtgaaatgaatcttggtggagagggcaagaagggctgggtgcggtggctcacacctgtaatcctagcactgtgggaggccaaggcgggcsgatcacttgaggtcaggagttaagagaccagccttgccaacagtagcctgtaatctcagctactcaggaggctgaggcaggagaatcacttgaacctgggaggcggaggtggcagtgagccaagatcgtgccactgccgcctccagtctgggcgacagagtgatacttgatctcaaaaaaaaaaaaaaaaagaaaaagaaaagaaagctaattattgttattgttattttgagacggagtctccctttgtcgccagtctggagtgcagtggtggatcttggctaattgcaacctctgcctcccgggttcaagcgattcctctgcctcagcctcctgagtagctgggactacaggcgcgcgccaccgcgcaaggctaattttttgtattttagtagagacggggtttcaccgtgttagccaggatggtctcgatcttctgacaggcgtgagccaccttgccccgcagaaagctaattataatagcagaatctgcaccgaaagcaagggagactacgtgggtcagagaacaatccccagtctccatccaagccctcctccatgcccaagccgtccgccagtgaataagttcagctcccgggcaaatccactgcagaaacggactcttccctccaccatccagtggagaggcaggaggggcgggaggaagagcggacagssgcatttgcgggaggtgcgcgcccggggctctctgtgggccaaaggcggccccccaacccgcagccccgggcagccaatggcgcccagcccctcccccgaggatgtggccaccgctgaggagcccgcgctggcagcacagagggcgccccgggcgcggagccacctggtcgggttttctggtcaggagggctcggcccgcaggcaccttggcaggagcgggcgccaggaacgcggcgggaggcagcggccctcgtgtctgcaaaagacagacactgtctgagcgtgggtccacacttcccctcccagtttggtgctggcttttctctcctccctgtccccctccggggtcccaggacagaggaaaccacagccacctccctcaaatgctgccaggccattatctcatctcatcctcacacagcccagagagggtgacgctgctctggctgccgccattttaagaagttgataatccaaactgcgggattaagtgacttgcccagcagctagaaagtggcagagcaaggacttgaacccatgtcggaaagtcagtggtcctaaccataatgcatcactgcctggggtgaagccctagggtctagtttttttttttttttttttgtgccagtgctgcctgagtgctttgagaggagtttctgcccactttgtgattcccagagggtaggattcaatgagctacaggaaaccttccagctgggtggggtctctgcacatccacacccttcagcttcaagcctcaggaagaaaggagcccagtcccgggttcttagggtttcaaggggccacctgtacccacaaagaggccaaggccaacttacccttcaccttcttgcttttggggatggcatctgctgggggggaccttcttttagctatgcgcttgggtgacatcttcctgtcctgaaagtcagtcaaatactacatatgagaaatggcaaacattttcctgggccaatcagacaatatttatcaaacactctagaaatacgttaagaggaattgcccaacaattccacttctcaaaatgtatcccaagaacagaataatggatgcacccacagattaattacacaaatattctctactgtatccttcataacattttaaaaacaacaaaaacagaacccgaatgttcaatagtagtgaactaaatatgtggtatattcatgatagaacagtatgaagccatcaaaagtgatgttttcagagatcaatctattgaatagaaagatgttccccattgccaagtaaaacaagcagaatgaaaaacagacggccaggtgtggtggctcacatctgtaatcccaacactgtgggaggccggggcgggcggattacctgagatcaggagttccaaaccagcctggccaacatggcaaaaccccgtctctactaaaaatacaaaaattagccaggcacagtgatgggcacctgtaatcccagctactcaggaggctgaggcaggagaatcgcttgaacccgcgaggtggaggttgtggtgagccaagatcgagccactgcactccagcctgggcaacagagccagactgtctcaaaaaaaaaaaaaaaaaaaaagcctgggcgcggtggctcacgcctgtaatcccagtactttggcactttcggaggccaaggtgggtggatcacttgaggtcaggagttcgagaccagcctggccaacatggtgaaaccccgtcgccaccaaaaaaaaaaaaaaaaatacaaaaattagccaggcatggtggtgtgcgactgtaatcccagctacttgggaggctgaggcaggagaattgcttgaacctaggaggtggaggttgcggtgagccaagatcatgccattgcactcagcactccagcctgggagaaagagtagtgaaactccaccccccaaccaaaaaaaaaaaaaaaaaaaaggaagaaaaacagcctatcatccattttttttttttttggaaaaaaaatgcatacacaaaaaatatgtgagaaaaatgtggggaagaaaatatatcccatattaacaatggtaacctcggaaaatggtattatagataatcattacttgtttcgttttatcttcctatattatctaagatgtttaacaaggagcattacatgtatttttctgttttttgagacggagtctcactctgtcgccaggctggagcgcacaggcatgatctcagctcactgcaacctccacctcccgggttgaagcaattcttgtgcctcagccttccgagtagctgagattacaggtgtgcatcaccatgccctgctaagttttgttttgtttttgtttttttgaaatggagtctcgttctgtcacccaggctagagtgcaatggtgcgatctcggctcatgcaacctctgcctcctgggttcaagtgattctcctgcctcagcctctcgagtagctgggattacaggcacccaccaccacacccagctaatttttgtatttttagtagagacgaggtttcaccagtttggccaggctggtctcgaactcctgatctcagtgatccaccccgccttggcctcccaaagtgctggaattataggcgtgagccactgtgcccagcccaaattttgtatttttagtagagacggggtttcaccatgttggccaggctggtcccaaactcctaatctcaagtaatccacctgcctcagcctcccgaagtcctgggattacaggcgtgagccactgcgtacagccgattacatgtttttttttttttttttttgaagcagagttttgttcttattgcccaggctggagtgccatggcgcaatctcggctcaccacaacctctacctcccaggttcaagtgattctcctgcctcagcctctggagtagctaggattacaggcatgtgccaccacgcccggcttattttgtatttttagtagagatggggtttctccatgttggtcccgctggtcttgaactcctgacctcagatgatccacccaccttggcctcccaaagtgcgggattacaggcgtgagccatcgtgcctggccacatgtatttaaaaaatttttaagtctgttgtaaaaaattaaaacattgaagaacaacattaaatgaaatatccatcataactccattcaaccccatgtaagcaccagtaactttggtaatgtgttgttataatcagagggggagaagagctattttcttttcttatttaattgattgattttttttagagacaaggtgccaccacacctgtaatcctagcactttgggaagtcgaggcaggaggatcgcttgagcccaggagttcaagaccagcgtgggcaacatggcgaaaccccatttctatccaaaaaattacaaaaattagccgggcatggtggtgcacgcctgaagtcctggctactcaggaggctgaggtgggaggatggcgtgagcctgggaggctgaggctaaattgagctgagattgtgccactgtactttagcctgggcgaaagagacagacactgtctcaaaaaaacaaaaacacacatgcactgaagatcgcggctgctgtgggaaggttactctgagcatcagttgcccggcatgtgagtgccattccttgggggcatttctgccactgcagccctcaggcctgctgcttctggaagaacaagtttgacaaacatattgtggtctggttccggtcaagcaaaattctggtaccagttcctcataccatgcacctgatgtcacccassatgcgccctattttaagggtacagccgtggtcaatggagagttcaaagacctaagccttgatgactytgaggggaaatatttggtgcttttcttctatcctttggatttctttctttttttttttttttccgagacggagtcttgctgtgtcacccaggctggrgtgcagtggcacrrtctcggctcactgcaacctccscctcctgggttcaagccaattctcctgcctcagcctcctgagtacctggaattacaggcgcctgccacgacgcctggctaatttttgtatttttagtagagatgggatttcaccatgttggtgaggctggtcttgaactcctgaactcaggtgatccacccacctcagcctcccaaagtgctgggattacaggtgtgagccaccgcgcccagccctatcctttggatttcacctttgtgtgtcctacagaaattgttgcttctagtgacaaagctaaggaatttcacgatgtgaactttgaagttgttgcagtmtcagtggattcccactttagccgtcttgcctggataaatacaccaagaaagaatggtgctttgggccacataaacatcgcacccttgtcagatttaactaagcgaatttctcgagacttcggtgtgctgttagaaggtcctggtcttgcactaagaggtctcttcataattgaccccaatggagtcatcaagtacttgtttttgtttgtttgtttgtttgtttttttgagacagcatctcactctctgttgcccaggctcaagtgcagtggcacaatcacggctcattgcaggtttgacctcttgagctcaggtgatcctcccacctcagcctctagaatagctgggactacaagtgcgcatcacagtgtccagctaatttttatatattttgtagagacagggttttgccaagttgcccaggctggtctagaactcctgggctcaagcgatctacccgcctcagcctcccaaagtgctgggattacaacagctgtgagccaccatgcccggccggagccacagtctttaaggtcatgaaaaacaatcaagttgtctaagcctctacctaatgttacgaagggaaggagaactccaagagcccttctcggtctcagctctgggcctaaccagcagccccctcattccttccttctagtggttcccgagaacctcgcctctctagctctcccctccatggtatatggacacaaggccaggcacttttctgctgattatcctggggaaggagaactaaatactaaagatgggaaagtaaccaaaggtctagaatcctgataagcctttgcaggctgagcttctgcaggttgtcactggcccagttctgactgatgaggtggcagttctgaacttcacccaacttttattctcccagggctgagaatcctcccacctgtcttttgagaccccttgtcccacactaaaaagtgcacattctttgggattagagggaactgggttcaccttccagagcttgtggctggccagttgccttaacctctctgaactgtatcctcatctataaaaggggatgcaatgactacttctcagggctgtcatcaagactgaatgaaatggttgtaaatccacaaatatttatagtgctttactactaagggaggagaccacccctcatattgtcttatgcccaatttctgcctccaaagaagtaaaaactaaaaggcagaaatgaaatccacaggcagacagcctggcgccgcgacctgtgtctggttaaagatcgacccctgacctaaccggttatgttatctatagattccagacatcgtatggaaaagcactgtgaaaatccctgtcctgttctgttccgttctgataaccagtgcatgcagcccccagtcacatatcccctgcttgctcaatcaatcacgacctcttcatgcagacccccttagagttgtaagcccttaaaagggacaggaactgctcactcggggagctcagtttttggagacgtgaatcttgccaaagctcccagctgaataaagcccttccttctttaactcggtgtctggggggttttgtctgcggcttatcctgctacactactgcttggctttgggtgaggaggtgtagcaaggataaaggagactaacccttttttactctcataatttgttcatcctttgtatttatttttgagacagggtcctgcccagacttgagtgcagtggcatggtcatggctcactgcagcctcaaccacccgggcttgagccatcctggatagctgggactacaggtgtgcaccaccacgcccggctaatttttgtatattttgcagaaacaacgtcttgccatgttgcccaggctggtcccgaactcctgggctcaagcgattctctagccttggactcccaaagtgctgggattataggtgtaagccaccatgcctggccttttattttatttttttaagagagggggtctcactctgtcacctaggctggagtgcagtggtgcaattagcttattgcagcctcgaactcatggactcaagcgatcttcccacctcagcttcccaagagcctgggatcatgggcacgtgccacagcacttggcttgatttgttcatcctaaaaaagtccagaggattcttggcaggcctgcccaagatccccctatgagcttggccaaacacaaagactcccaggcttgggcttaaatgaccaggtagatggtagacttccatgtagtgagatagagaacactgttgaacaaacaggagagaagagacgtgaagctccatgttgctaggtgttttcattcaatctgaagtgcttgggagccatcccagaaaggatgtcaggcaggcaaagttagatggggtagggatgtgggatataagaggcatctttgtggccgggcacggtggctcacgcctgtaatcccagcagattgggaggccaaggcgggtggatcacctgaggtcaggagttcgagaccagcctgaccaacgtggaggaaccccatctctactaaaaatacaaaattagccaggcgtggtgacgcgtgctgtaatcccagctactcgggaggctgaggcaggagaatcgcttgaacccaggaagtggaggttgtggtaagccgagtttgcaccattgcactccagcctgggcaacaagagtgaaactctgtccctccaccaaaaaaagaggcacccttgttttagatagacagctgtatgccaaggcaaacatctcatcagttcatcagaataatctgtagcagtctgctgtgcctgggagggagactgtattagcatgaaaagtactcacaataagaagtcaggagaaaaagcaggaaacaattatgtcagcacagttggtgctgatggctgggctgccatgagcacagcccggaatggagtcagacacataagggctatatgaagtgttggtgtcatggggcattaaccaaaaaatctgttatcatggatggaacaaacccagtcaacatctccttagttgtgtttggctaatattctggagcgtttcactacaagctggccacaatgatcccactctacagagaagaaaactgaggctcagaaaggtgaagtatctcactcaagattggaagagaaggccaagatctgaaccaagttagtcagactccagagctggcgtccttgagtgttattagaaatttcttctggccgggcgcggtggctcacgcctgtaatcccagcactttgggaggccgaggcgggcggatcatgaggtcaggagatcgagaccacggtgaaaccccgtctctactaaaaatacaaaaaattagacaggcgtggtggcgggcgcttgtagtcctagctactcgggaggctgaggcaggaaaatggcgtgaacccgggaggcagagcttgcagtgagtcgagatcacgccactgcactccagcctgggtgacagagcaagactccgtctcaaaaaaaaaaaaaaaaaaaaaagaaatttcttctgcctccttcctccccatgctccctagtagtctctcagcttgcctggaactgtgtctcctcctcctttccctaggaaagacagcaacttttcactggtcttccggtccccaccctcatcccctcctctcattctccaagtcattcgtgatcaataaatatgtgtgtgtgtatatatatacatatatatatttatttttttttgagacagggtttcactctgttgcccaggctgtaggtgcagcagcacgtacacggctcactgcaacctccacctcctaggctcaagcgaccctcctgcctcagcctccagagtagctgggactacaggcatgtaccaccacgcttggctaatttgtaatttttttttttcttgtagagacaaggtctcactatgttgcccaggctggtctcaaactcccgggctcaagtgatcctcccacctcgacctcccaaagtactgggattataggcgtgaggtaccatgcccggcctcattcatgatctttccaaacctcaaacctgaagcaagctgctggcctgcttggactccttagtggtccccttttcctggaagataaagcccacatttcttagctgggtattagaggtctccaacatcgggtactgacagaacctttagcttcatttcctatctatcacatcctcccttctcttcccacacaatctccttgccagacccaccaggccagaatgctaactgtcctctccatactatttgcatctctttacctggaacgccttcccatcccttatcccactggaagaacatctactggtgtctcaaagtcacctcctctgatccctcctccatcctgaactagtcattctctctgagaaactgggacagacttttggatcacaatcactttaatttacatgcctgtccaccataccaatcaacttcctaaaatatgagcccctgggggcaccggctaactcactgtatcttccatatgcaaaacccttttattcctcacaggaagctgaagaaggcagcactgtcactcctatttcacagttaaggaactgaggctcagaaagataactttatcggcctaagttcacagagcaagtaaagggcagcctagaaaagcaacccaggcctatctgactgattctgaaggcagaccttggtccaggcaggggctaaggcagtctgggcaggcctccccagtatcccctatgcacttggccaagtccaagaagcagagagcagaagccagctgaggagaggatggtgagaccagagaggagacaatgaggcagctagagcctgagggaaggtggggtgggtggtgacagatccacccacagatgtggggaaggacagtggcgacaactccctgctgcggtggagacggcacctgagtgctctttgagtcccagaggcttcctctccaaaatggaagacttgaggccctgcactgggctggcaatcgccagggaagggcaggggatggagggccaccttcttttttttttttttttttttttctgaggtggagtctcgctctgtcgcccagtctggaggcaatggcgcgatatcggctcactgcaagctccgcctcccaggttcacgccattctcctgcctcagcctcccgagtagctgggactacaggcgcctgccaccacacccagctaattttttgtatttttagtagagacggggtttcaccgtgttagccaggatggtctcgatctcctgacctcatgatccacccacctcggcctcccaaagtgctgggattacaggcgtgagccactgctcccggccagaggaccaccttctaaaaggtggagccctgttcccggtacctgcctgcacagcctctactgcacaaatgggtcttgtatacagacttctctcactgctctgggtgtgttttcctttatttgcttttcttttcttctttttgagatggagcctcactctgttgcccaagctggagttcagactcacgatctcagctcactgcaacctccgcctcccaggttcaagcgattctcccgcctcagcctccctagtgctgggactacaggcgcaagccaccacgcctggctaactgcttggtatttttagtaaagacggggtttcaccatgtcggccaggctggtcttgaactcctgacctcaggtgatctgcccaccttggcctcccaaattgctggggttacagtcgtgagccaccgagcccggcctctctggctgttttcttaaccaggcagtgagtgtctgggctgggaataaggagttggcttttggcatcatgcttccccaccccgccccacacaacacagcttccatcttcaaggagcatacagtctctgggagaagagtgagacagtcacagataagtcggctacagagtcagcttccaccatcaggcactcctgaatgcccacagctgccctttgaggtgagcagactcatcccagttttacagctaaggggaagatgaggctcagggaaaggtgacccaggtcacagagaggtggaatgaaatcccagtctcatgaccatgctccaccagagctggagctgccctacccccacctcaccttccttatttattgaagaaagtgggtaggcacgccagtctagacagtctgcccggagcctggtgctcctgccctgacctccagtgacctcaccacagcctcgatttctgtaaaaggaga

SEQ ID NO: 94197 - DNA, 52242 bp, Homo sapiens
agctatttgggaggctgaggcagcaggcttgcttgaacctgggaggcagaggttgcagtgagctgagatcacgccactgcactccagcttgggcaacagagtgagactacatttcagaaaaaaaaaaaggcagctgggtgcagtggctcacgcatgtctgtaatctcaacactttgggagcctgaggtgggaggattgcttgagcccaggagttcgagaccagcctggccaatatagtgagacttcatctctacaaagaatagacaatcttagctaggcatggtggcggatgcctctagtcccacctactcaggaggcttaggtgagaggactgcttgagcccaggaatttgaggttgcagtgagccatgatcttgccactccactctggcctggttgacagagcgagaccctgactcaaaaaaaaaaaaaaaaaaaaaaaagctacaggtatatgaaagatagttaaacaaagaaaatcttaatttagatataaaagtttaaactcatatagtaataacaccccacaaaaatacctgaaagtcctctttatgtgacttgacatattaattagaagtcttcattattggtctatcttactctaaacaaatttggtaaatggaaatatatatatatatgtagatcaaatgtgactttgctttataaaatgaatcattatagccccaaacactccagatattatcttattggtcttatgtatattgacctaattacttgtgagcatgaacttttttttgagatagggtctcactctgttgcctaggctgaagcacagtggcacaatcatagctcactatagcctcaacctctcgagctcaagccatcttcccacctctgcctcctgagtagctgcaaacacaggcacacaccaccacacctggctaatttatttttttgtagagatggggtctcccatgttgcccaagctggtcttgaactgggctcaagagatcctcccacctcagcctcccaaaatgctgggattataggtgtaagcccacaagcccagctgatgaacatcttttaatatgaatttcttctttggaaatgtgaccatctttctgctgggttatctttctcttactgatttataacatggatacaaagcctttggcttttttgagacagggtcttgctctgtcacccaggctggagtgcagtggcatgatcatggctcatgcagctttgacctcctaagatcaagcaatgaagcctttgtaattgcaaatattatttcgtctcctgactaaattttatgtttttttgtcatggcaaattattattttttaatagacaaatctatcttctcctttaaatcttcttcgttttgtgacccatgaaggcaggccctaaccatctcaagatttatacatctttatattcaagacttttacaaatttttgttttctagctgcagacaaaagccacctgcaacattttttgttatgctttgaagtaggggtctaactttcctttcaaaaacaccctttactaatcagtcttttatttattgatccaggagaatttggtctacaataaaggtggcatattgattaataaataaaagactgactagtaaagggtattagggcaattggctagtcattgataattttctgttcctaaggaatcacttcttttttttttagactgagtcttgctctgtcgccccgactggagtgcggtggcacgatttcggctcactgcaacctccacctcctgggtttcagcaattctcctgcctcagcctcttgagtgcgtgccaccacgtccggctaatttttgtatttttagtagaaatgtggttttgccatattggccaggtcggtcttgaactcctgacctcaaatgatccactcaccccagcctcccaaagtgctaggattacaggcatgaggcaccccacttggcttttttttttttctttttttttttgacacagagtatcgctctgtcacccaggctggagtgcagtaggctggagtgcagtgatgtgatctcagctcactgcaacctccacatcctgggctcaagtgattctcctgcctcagcctcctgagtagctaggattacaggtgtgccaccacatctgcctttttttttttttttttttttggtatttttagtagagacagtgtttcgccatgttggccttggcctcctaaaatgctgggattacaggcatgagccactgtgtccagccctcaggcaacatttcttgctatttacattattatggctttatcactgatatatctcgataactgataatgacttgcctttattgttttctcctccccaaaattcttggctcttcttgtgcactttctcttccagatgaatttaacaatcagtatgtcaagtttcattaaatatcctattgactggggccaggcatggtgtctcacacctgtaatcccagcactttaggaggctaaggcaggcagatcacttgagaccaggagttacagaccagcctggccgacacggcgaaaccccgtctctacaataaattaaaatattagctgggcatggtggtgtgtgcttgtagtcccagctacttggcgggctgaggtgggagaatcatccaagccttggaggcagaggttgcagtgagctgagattgtgacactgcactccagcctgggagacagagtgagactcctactcaaaaaaaaacaaaaaacaaaaaacaaaccacaaaactttccaggtaacttattaaaacatgttttttgtttgttttgagacagagtcttgctctgtcgcccaggctggagtgcagtggagcaatctcagctcactgcaagctccgcctcccgggttcacaccattctcctgcctcagcctcccgagtagctaggactataggcacccgccaccacgcccagcttattttttttgtattttttagtagagacggggtttcatcgtgttagccaggatggtctcgatctcctgacctcgtgatccgcccacctcagcctcccaaagtgctgggattacaggcgtgagccactgcacccggcctagtttttgtatattttttttagtagagacagggtttcaccatgttagccaggatggtctcaatctcctgacctcgtgatccgcccgcctcggcctcccaaagtgctggggttacaggcgtgagccaccgcacacagcattaaagcatgttttattttcctacacataatgaaatcattaccagatgatttgacatgtgtacttcattggagaggattcttacagtatattcaaaattaaatataatgacaaaaaattactacctaatctattaaaattggcataagtcatctatgatcattaatgatatgcaaacataaacaagtattatacccagaagtgtaatttattgtagctacatcttatgtataatagtttagtggatttttcctggaaattgtccattttaatttttctcttaagtctgtggaattttccagtaaaagtcaaggcaaacccaagatgtaactgacaatgtcttttcagagttagtttcctacagtctaaccacactggatgacttgctgttccaaaaatgtcatgcacttttttgagcctgcatttttttttctacctatgaagcccagttcattcttcaaagtctagttcaagtgtcaccttctctacaaggtcttccttgatttcctcccaatcactaggttgtgaattatttaagtagggattttaccttttctttctttcgttcgttcgttctttctttcctctttcttttttttttgatggcgtctcacggtcacccaggtggagtgcagtggcatgatcttggttcactgcaacctctgcctcctgggttcaagtgactctcctgcctcggtctcccgagtagctgggaatgtaggtgcccgccaccacgctcagctgatttttgtacttttagtagagatgaggtttcaccatgttggccaggctggtctcaaactcctgacctcaggtgatccgcctgcctcagcctcccaaaatgctgggattacaggtgtaagctatcgtgcctagcctttaccttttttttttttttttttgagatggagtctcactctgtcgccaggctggagtgcagtggcacgatctcggctcactgcaacctccgcttcccaggttgaagagattctcctgcctcggcctcccaagtagctgggattacaggcacgcactaccacgcccagctaatttttgtatttttaggagagacgggtttcaccatattggccaggatggtctcgatctcttgccctcgtgatctgcctgcctcggcctcccaaagtgctgggattacaggcgtgagccaccgcacccggcctttaccttttctttatacaccagcatccagcacaatcttggacagacaaaaagtgccgaataaacaactggtagatgaataatgagaattgattgcttcttctttagcattcaaatcttttttttaaaaattttttttgagacggagtctcgctctgtcgtccaggatggagtgcagtggcgcgatctcggctcactgcaacctcagcctcctgggttcaagcaattctcctgcctcagcctctccagtagctgggactacaggcatgcgtcaccacatctggctaatttttgtatttttagtagagatggggtttcaccatgttgtccaggcgagtcttgaactcctgacctctggtgatccacttgcctcagtctcccaaagtgatgggattacaggcgtgagtcaccgcgcccagctcaaatcttattctctatttagcacttatttctgcctttaattatatatgattttattataatacgttatctcctctgactaaactctggagaacagaatatgagtctgattcctctctcagctttctcagtacctaatacagaatagaacgtcgataatttggtcacgtatataaaggctcaacatattttaaggagctaaagctattctgaatacatttcagtaaaaatgggtgcattttaaaagccttaacctggtactacattagttgagatttatccccgaaagattaactcgttggcaccacctagtagtcactaaatgtggtgcacttttcacttttacgaaactacagaaaccgctctcagacactatatctggagcggagggtcctcattcatgctcacctgtctcttagtactctgatctctgcacagtgccgaccggtctcaaattgcacaaacctccagttcttgacgttccgagtgtcataaacttgaggaaaatgaaattattcatcaggactacaaaaggctcaaagttcaaaccacctcggggtggagatgctggaaaaaaggaaaccattaacaagtaattttatttgctatatataaacttgccctaaggcagtccagataacttccacttgagcagcctgagacatcaagggcgggggcactttccccctcgactgcgcctaccgcagcctttctgagtttcttcctagcgaggccgagagggtctttgaggaaaatcccgcatccggacacgccttgagggatggcgtcaaacccagaggcttggaaaaggtaagggcggagagcacgcctcttccttgaaagtgaggagggtttggcccagaaccaacaggactgggtgaagaatcagctccggccaccgcagcaaatcccaccccacgcgggaacttgaagtccggcacgtaggtcccgcggcggccgggctccaacaggccccaattgccaccagaggtagccgtaaacccatggtccccgaaactccttccgggcctacctgacaaaaactgagacaacctccttaggcccccgggattccccctgtgccgcctgaccgcccgccagtcccagagtttagggccaggggccccgcctacctgagggcactggcctggcggaccgcgccgggggagcacttccgctggacscacgcacttccggccccctggaaccaatgagagtgcgaccgagatgttccactcgctggcgtccgggccgctggtgatctccggtagcactcgggccggcggacagtgagggcgcggtaagctccccgcaaggagcccctgagaaactggtcgctttttgtcctagatataggggagtccaggatggtgtggtggagtctttagagtcgaatatgacccgaggcaagctcatattcaggtttsgggcaaggagctttgattgacccttaattttttcagtggaacggaaaacttcggtaaaatagcttctgaccttcggaacagatggattcaccttggaaaggaaaaatctctttctagaagagtcttgaggtctggcacctttaggcttaacgggggacggctgggcgtcagaggaggaaatccttcattccgaacgacttccctttcctcctaaatccttctttccaaatctgtaaaagactacatctactttgctggaggtggtttgacactcatgctccttgagaaggaggtaatgagctgtagggcagctcttaaaaagttacccttggacgggcgcggtggctcacgcctgtaatcccagcactttgggaggccgaggcaggcggatcacgaggtcaggagttcgagaccagcctggccaacatagtgaaaccccgtctctactaaaaatacaaaaaattagctgggcgtggtggtgggcgcctgtaatctcagctactcgggaggctgaggcaggagaatcgcttgaatcctggaggcggaggttacagtgagccgagatcgcgccattgcactccagccggggcgacagttcgagactccatctcaaaaataaaaataaaaaaaagttacccttggctgtcgcggtgtgacacctgtaaacccagcactttgagagcccgcggtgggaggatcatttgagcccaggctgggcaacatagcaagaccctcataacaaaaaattaaaaataaaattacccagaaactggttggaactatttaatgatgttcttagtccatcttcctgaagtagtccacagaacaacatcagtgttcatggtagaattgtttcatcagggcagtttttttttaagtaacaatgtcttgttaaaaaacaagagctgtgttgcccaggctggagtgcagtggtgtgatcatagctcactgcagccttgaactcctgggctcaagcgatcctctggccttggcccctcaaagtgttgtggtgattggcacaagccaccgacaggcctggagtctgaagttagttatatttcagctacccaggataaacttctaactatgattaccacagaactctaccaaaactaattgtttcacttagttctgtctgattatggaatctctttattaccatcagttgtttttcagagttayaatttgaatatgaaaccatttttctagcccaccttagagaagactgttgacacactagttgaaatggttgcaatagcctctaccttgcaagacacttcagattcaaagaatttcctttgcaaaagtcggccgggtgcagtggctcatgcctgtaatcccagcactttgggaggccaaggcgggcagatcacttaaggtcaggaattcaaaaccagcccggccaacatggtgaaaccccatctctactaaaaatacaaaaattaaccaggcgtggtggtccatgcctgtaatcttagctactcaggaggctgaggcatgagaatcgcttgaactcaggaggtgaatgctgcagtgagccaagatcacgacgctgcactgcagcctgggtgacagagcaactccgtcttaaaaaaacaaaacaaaacaaaacaaaagaagaaaaaaataaaagtacctattaatgcaattatctttcaattttgattcataaatatgtgtggaagtgtcaatgttttgggtaaaatggaattcacagtgacagagtcagtgccatacaaaacaaaactggaaaatatactttaaaaaaattatttgagctgggtgtagtggctcacacctgtaatcccaggactttgggaagccgaggtgggcggatcacgaggtcaggagtttgagaccagcctggcccctatggtgaaaccctgtctctactaaaaatacaaaaaattagctgtgcatggtggcgtatgcctgtagttccagctactcgggaggctgaggcaggagaattgcttgaacccggcaggcggaggttgcagtgagccgagatcgtgctcttcagcctgggctacagggtgagactcggtctcaaaaaaataataataataatttgaaaaatttgctgaataaacatttgttcacagtgtactttccctgattttttaatttttgtttttgtttgccctgtcacccagactggagtacagtgacacgagcacggctcactgcagccttaatctctcaggctcaagtgatccttgcacctcagcctccctagtagctgggacttcaggtgcatgccaccacatccggctagtttttgtattttttgtagagatgaggttttgtcatgttgcccaggctggtttcaaactcctgggctcaagtaatcctcccaccttggccccgcaaagtgccggaattacaggcatgagccaccccacccagccttcccctaattttgataatgataatccaatgttctgttctggcatttgtgtagttttagcgtgtgcagtcttcgaagcagtggaggtatttgccttttcttctctgtgacttagtcattcagcagttctatgctaagggtttttttatatgcctttaggttcttgtttagagttaatggataatgaaaacatttctaatgcataagagaaatgcattctgaaacaaaaatagaatacaagccttcagacagaaggcagagaagaaactggagaaagagaaataagatgttaggtaggaaaccatgggagacagcactggggaaagtaacctccagactgggagtcactgggaaaccagataaatgctccttggcagcgggaggagttgaggacacttcagcttggtcttgggatgggagcccagagaacgcaagttgctccaactaggtagggaaaatgctgggacagatgaaacttgagtggctaacaagaagtaccaggagccaaaggctctctgaacacttgggcctcttttaaatgtctgccttaaatagcttgtaccattgtaagtcttgcataatgggtgagaacatgaacttttagaatcaaagatgtcactctaggtgtggttgtatttggagtaaggaaataattaaggttaaatgaggtcataagtgtggggccctgatccgataggactagtgtccttatcagaagagtgaatggagagcttgccccttacccttacatactgaagaaagattatgtgaggactagcaagaaggtggccatgtacaagacaggaacagagctgccaccagagaccaaattggccaaaaccttgatcttgggcttctagtctccagaatggtgacaaagtaaatttctgttgtttaagtcacccagtctgtggtattttagtatgacagcccaagcagacaaatacaccatctatatgcagatacatccaaatctctagtctgttgtatgtctgtacctctcccctgaacttggctttgttctccacttgcctacttattgtcaccacttggatatataatagatgtctcaaacttcacttctctgtaaactgaactcctgatagtcccctcaagcctactccatagacatctttctcttctcttttttttggagacagggtcttgctgtgtcgcccaggctggagtgcaatggcgtgatcatggttcactgcagccttgaactcctagacttaggtgatcctcccacctccgcctcccaagtaggatgtgagggcaacctggctgtgacatctctcaccccgttgatcaccagggttgatccggctgatctggctggctaggccggtgtctccttcctccctcactgctccatgtatatccctcccgaagctgcacactcaagtcgaagagaacgaccatccccaatagaggaggactaatcttcggtcaagggtatataagtagctgcgttcccctgctagaacctccaaacaagctctcaaggtcccaggtagctaggattacaggcacacgccatcatgcttcactatcattctcttctcaattaaaggtaatactgttcttttagctgcttaggccaaaaacttttggagtcatgcttgacttttctttctttcacagcccacatcccatccattgcaaatcacattggctgtatgttccaaatacacccagaattgagtgacatcttatcactttgctaccaccatcagggccaggtcagcatcacctgtcacctggattattgcagtagcctcccatcttatgtcttcacttgtacccttgcctctccctacattctgttttcagcttcaactgctagagagatccttaaaaatatgtcagatcatgtcactcctctgctcaaagccctgcagtggttgatgaggtctagagaatgtgttgtttctaaataatttctgttaatcatggtaatataattacttcaaaggaatttcattcttattgtgtgattgctcgcatttctaattcctaacttagtgctgtgtctgggatgtggaaggtggtccgaaaatgttggtggcgtcaagggatagtgggtatatattaggtaacctctccagatragaacagatgaacagtcatttccatgtgttcaggtgctgtgcctgtcagagatactttgggagattttatactgaatacgttcttcttgcccattagtactgttctttttctcaagaaatggagttgtcggccaggtgaggtggctcatgctcgtaatcccaacactttgggaggttaaggtgggcggattgcttgagcccaggagttygagaccagtctgggcaatatagtgaaaccttatctctacaaaaaaatacaaaagagtagccaggtctggtggggcatacctgtagtcccagctacttggggtaagggctgaggtgggaggatggcttgagtccgggaggtggaggttgcagtgactgtgccattgtattccagcctgggtgatagagcgagaccctgtctcaaaatgaagtggtatccagtccttaatgacattgggaccatttgtgagtaactagtccctaacaaaaatacttcagaatttttttttttttttgagacagagttttactcttgttgcctaggctggagtgcaatggccccatctcagctcactgcaacctccgcctcctgggttcatgtgattctcctgcctcagcctcctaagtagctggtacaggcacccgccaccatgcctggctaattttttgtatttttagtagagacggggtttcaccatgttggccaggctggtctcgaactcctgacctcaggtgattcacccacctggcctcccaaaatgctgggattacaggcgtcagccactgtgtctggcccggaattgttaaatatacactgaagtaaaaagacaaaacacggctggccatggtggctcacgcctgtaatcccagcactttgggaggccgaggcaggtggatcacctgacgtcaggtgttcaagagcagcctgaccaacatagtgaaaccccatctctactaaaaatacaaaaattagccgggcatggtggcaggcacctgtaatcccagctacgtgggaggctgaggcagaatcgcttgaaccctggaggcggagatttcagcgagccgaaatcacaccactgcactccggcctgggcaacagaccaggactctgtctcaaaaaaaaaaaagagaaagacaaaacacaatgcaggtcacttagctattttctctagaaaacaattagctgtcatgatgcagaagattgttataatctataagggggaggttgtggttatttttactctaaaatcttccactgcttttttttttttttttttttgagatggagtttcactctgtcacccaggctggagtgcagtggtgcaatctttgctcactgcaacctccacctcctgggttcaagcgattctcctgcctcagcctcccgagtagctaggattataggtacacaccaagaggcccagctaatttttgtgtgtgtgtatatatatatatgtatgtgtatatatataatttttttgttttttttagtggagacggagtttcaccatgttggcaaggctagtctcaaactcctgacttcaagtgattcgcccacctcggcctctcaaagtgctgggattacaggcatgagccaccgtgtccggccccactacattcttaaagaagcaataaattgaccttgtttaaatacacaatctgaattactggggtcttttgaaactaaacctttgttcattactaagatttctattttccttcctctttttcagcacttatttctatagcagtctcccagctgatgccacttaacttcattgaacaaaaaatgaggtttagaaaatcacaataatcattgtgaaagtatttgataggagatctttatttggggtgaattgggttatgatgtcagtcctgtgatttcagcggaactgtttctttttatccattgtcagtgagtgctcattaatacttaaatgcagctttctttttctttcttttgagacagagtctcgctctgtcacccaggctggagggcagtgacgcaatctcggctcactacaacctctgcctcccgggttcaagtgattctcctgcctcagcctcccaagtaggtgggattacaggcacctgcaaccatgcccggctaatttttgtatttttagtagtgacagggttttgacatgttggtcaggctgatctcgaactcctgacctcaagtgatccgcccgccttggcctcccaaagtgttgagattataggcatgaaccaccacgcctggcataatgcagttttctactaaatgactgattttgacatgcttcctgttattggccctgctgttcagctgaaatagcaggataggagatggtcgtgtgatggccgataggtggcagtgctgctgggacaggcccagcctggtagagacgagtatctcagacaggaaaaacaggacccagatggctcagactgttgggttagcatctggccttcgacaggtcaccctggcccgccagatcagccccaggcctgacaaaagcactacaggataaagaataggatctcattaaatgcagtggaagtaacgtgagaaggatggcttttcatatgccatcctaaccctcccctccccccgttttctttgctttgcttttcatacttcttagcttcttggatctcttgctttaagaggaactagggtgtgggcacagtggttcacggctataatcccagcactttgggaggctgagacgggtggatcagttgaggtcaggagttcaagactagcctggccaacatggcgaaaccccatctctactaaaaataccaaaattatccaggcatagtggcacacacctttaattccagctactggggaggctgaggcagaagaattgctttaatcaaggaggaggaggttgcagtgagccaagatcacgccactgcactccagcttaagcaacaaagtgagactctgtttcaaaaaaaaaaaaaaaagaggaactagagcttaatattctccttgcaacatcacagtcacagtgctggttgagtagttacttgcctcgaaggactggtaagcctttgacaaggattggttacttgggaagttttcttgcttacctgtagaagttaagctgctcaccgacaggagcacagacaagtagtaaagttcaggggttgttgtttcctacatttgagagagaaaaggtgctatgaggaatactttgtcttttaatcagaatgtgttaaaaatgttttgccacaaggatttaaatgaaggtgccaatttagcaagaaatagaagtcttgctgtatactgtgccaaacccaatccaacagcttcagttttttkttgttgttgttgttgttgtttgtttgtttgttttgaggcaagatgttgctttgtcatccaggccaaagtgcagtggtgtgagcatggctcactggagccttgacttcctgggttcacgggatcctcctgcctcagcctcccaagtagctgggactacaggcacgtgccaccaggtccagctaatttttgtaatttttgtagagatggggtttctccacattgcctatgctggtcttcatctcctgggctcaatcgatctgcctgcctcagccttccaaagtactgggattagaggcgtgagccactgtgcccggcctgtttcactgttgattaatatcttaactacttttcgaagctctagtaaagtagaattcacctacaaaaacaaaaatctcttgtagaatttttaaactttccccagtgaaatgttttaactgtgacatgtgcctaatcaggtattccatctccacatatctcttcttttggtgtcagtagaaaataaatattgaagacatattatttacagccaaactttcagattaagataagcctttagaaattctttgtttatggctcacgcctgtaatcccagcactttgggaggccgaggtgggtggatcacgaggtcgggagatccagaccatcctggctaacacagtgaaaccccatctctactaaaaaaaaatacaaaaaattagccgggcatggtggcgggcacctgtagtcctagctactcgggaggctgaggcgggagaatggcgtgaacctgggaggcggagcttgcagtaagcacagattgcgccactgcactccagctggggtgacagagtgagactctgtctcaaagaaaaaaaaagaaattcattgtttaaaaacatacacagtctgttgccaaaactgttaacaccatagtgcagactccttaactgaaggatcccacaccaaatgcagaagacatccacttcagtgcccgtggcaatggctccatctgaacaaactgcacagtaaaacctaaaaagacagaggaacagcatcagtttttaggtttaatcatctcagaaagaaacatattctttgtttttttgtttttttttcttaagacagagtctcactctgtcacccaggctggagtgcagtggcacaatctcagctcacggtgacctctgcctcctgggttcaagtgattctcctgcctcagcctccctagtaggtgggattataggtgtgcaccaccacttctgggtaattttttgtatttttagtagagacagggtttcaccatgttggccaggctggtctcgaactcctgacctcaggtgatctgcccaccttggcctcccaaagtgctgggattataggcgtgagccaccacgctcggctagaaacatatttgagccaccacgctcggctagaaacagattcttgaatgcaaacctaaatgcaatttgtttccttcccttcctgctgtggaacagaaatgtccagtctgggcaaactmatttttcctttgatatagattgtatgcatgttttttttttttgagacggagtcttgctctgtcgcccaggtggaagtgcagtgacgtgatcttgactcactgcaacctctgcctcctaggttcaagcaattctccggcctcagcctcccgagtagctggaactacaggtgcccgccaccacgcctggctaattttttttgtatttttagtagagacggggtttcactgcattatccaggatggtctcgatctcctgtccttgtgatccacccacctcagcctcccaaaatgggattacaggtgtgagccactgtgcgcgggctttttttttttttttttgagacggagtcttgctctgttgccaggctggrgtacagtggcgccatctcagctcactgcatcctctgcctcccaggctcaagtgattctcctgctccagcctcctgagtagctgggattacaggcctgcaccaccacacccagctaattttgtttttttttttgagacggagtctcactctgttgccaggctagaatgcagtggcatgatctcggctgactgcaacctctgcctcccgggttcaagtgattctcctgcctcagcctcccaagtagctgggactacaggcgtgtgccaccacgctcagctaatttttgtatttttagtagagacagagtttcaccatgttggccaggctggtctcaaactcgtgacctcaggtgatccatctgtcttggcctcccaaagtgctgggattgcaggcatgagccaccacacccggccctattttttcattttaaaaaattcggacatagtttttgctgaaatcatatatcactcttttttttttttttttttttttttttgagacagagtcttgctctcttgcccaggctggagtgcagtggcacgatcttggctcactgcaacctccgcctcccaggttcaagcgatcctcctgccacagtccccatcgtagctgggactacaggcacgtgccatcatgcccagctaatttttgtatttttagtagagaaggggttttgccatgttggccaggctggtcttgaactcctgatctcaggtgatccacctgcctcggcctcccaaagtgctgggattacaggcatgagccaccgcacccggcccatacatcactcttaaaagcacattcaaaggaaaatataattaagatagattagctaaaatatttcttaaacttctccacatttcagaatgttgagaatagagaccaactctgtgtcctttttttttggagatagggcctccctctgtcacccaggctggagtgcaatgacatgactcactgcaccctccacctcctgggctttagtgaccctcttacttcagcctcccaagtagcagggactacaggtgcatgacaccatgcccagctaacttcttctattttttgtagagatgatgtctcaccatgttgcccaggctggtcttgaactcctgacttcacacgatcctcccacctcagcctcaaagtgttggggttacaggcatgagccactggacccagccctgtatcactttttgacttcaagttgccattgtccttgtttttctacgcagaatcatctcttgatcaatgactatttattgaatgaaaaacccgatactttaatattataacactaaagaattttatagcagaaggaatttgggccaggcatggtggctcatgcctgtaattccagcactttgggagtctgaggtgggtggatcacaaggtcaggagattgagaccatcctggccaacatggtgacaccccatctctactaaaaatacaaacattaggttcgtgtggtggcgcgtgcctgtaatcccagctactcaggaggctgaggcacgagaatcgcttgaacccaggaggcggaggttgcagtgagccgagatcacaccactgcactccagcctggcaacagagcaagactccatctcaaaaaaaaaaaaaaggaatttatgtttaacttaatttggttccgtactcaaattatagaacaactaaaagagaggccaggcacgctggctcacgcctgtaatcccagcactttgggaggctgaggcaggtggatcacctgaggtcaggactttgagaccagcctgaccaacatggtgaaaccccatctctaagctgggcgcggtggctcacgcctgtaatcccagcactttggaaggctgaggctggtggatcacctgaggtcaggagtttgagaccagcctggccaacatggtgaaacctcatctctacttaaaatacaaaaaattagctgggcgtggtggtatgcacctgtaatcccagctactcgggaggctgaggcaggagaatcgcttgaacccgggaggcggaggttgcagtgagctgggatcgcgccattgcactccagcctggggacaagagcgagactttgtctcaaaaaaaaaaaaaaaaaaagaaagaaaccccttctctactaaaaatacaaaattagctgggtgtggtggcgcatgcctgtaattgcagctactagggaggctgaggcaggagaatcacttgaacttgggaggcagaggttgcagtgagccgagattgcaccattgccctccagcctgggcaaaaagagtgaaactccatctcaaaaaacaaaaagcaaaaacaactaaaagagatacttaggaagtttttaaagattcccttcacctgaattttagatgtgagttgtttttttaattttagtctatgagttcctgaagagcagagagctctgtcctaccaatttttgttgtagcagtgtctggctactatttgtagtagatacttaataaatgcttgacggataactacacacttaccaattgtgaagaaggtaaagatggtattactaaccaggttgtacaggagagattggctgcaatattgggaagatctgggcctaaaagtcaataaactgggtgatacattaatttattacttattacaggaaatctatggtatacgcgtaacaccagaaggcactaatccttgaactctaattcttattctggcactgggttcatcttggctgtaggcaactcacttctcttgagaaccttggttcctttaccatgactgtaaataaatgctacaaaatagtccataaataatagtaagagttattagtgtcatcactggtaaataaataacgtttaccatgtttcttttctttttttttttttttttgagacagagttttactttgtcacccaggctggactgcagtggtgcgatctctgctcactgcaacctctgcctcccaggttcaggcaattmttgggcctctgccttcccagtagctgggattacaggcacgtgccaccacacccggctagcttttgtattttttggtagagatggggtttcatcatgttggccatgctgatctcgaacccctgacctcaagtgattggtctacctttttttttttttttttttgagacagagtcttgttctgtcactgaagctggagtgcagttgtatgatctcagctcactgcaacctccacctcctgggttcaagcgattctcatgcctcagcttcctgagtagctaggattacaggcgtgtgccaccacacctggctaatattttgcatttttagtagagatggggtttcatcatgttgtccaagctggtctcgaactcctgacctcaggtgatccgcccaccttggcctcccaaagtgcttggattacaggcatgagccactgatcctggccttgtttaccttttttttttttttttttgagacagagtctcgctctgtcacccaggctggaatgtaatggtgtgatcttggctcactgcaacctccacctccgaggttcaagcgattctcctgcctcagcctcctcagtatctaggattrcaggcacatgccaccatgcctggataatttttgtatttttagttgagatggggtttcaccatgttggtcatgctggtctcaaactcctgatcttgtgatccacccgcctcggcctcccaaaatgctaagattacaggcatgagccattgcatctggcctttttatttttatttttgaggtggagtttcgctcttgtcacccaggctggagttcaatggtgggatatcaactcactgcaacctctgcctcccaggttcaagcaattcccctgcctcagcctcctgagtagctgggattacaggaatgtaccagcatgtcaggctaattttgtatttttagtacagacagggtttctccatgttggtcaggctggtctcacactcccaacctcaggtgatccgcccacctcagcctcccaaagtgctgggattacaggtgtgagccaccgtgcccagtcttgtttaccattttttttttgagacgcagtctcactctgtttcttgcagtgccgcgatcttggctcactgtaacctccacctcccgggttcaagcaattctccttcctgagcctcccgagtagctggattacaggcatgcgccaccacgcgagagtgggcttcaccatgttggccaggctggtctcgaactattgacctcgtgatccacgcctcggcttcccaaagtgctgggattacaggtgtgagccaccgtgcccagcccttatttaccagtttttaaattcacgttaatttgcgattttggtgaaaaactatttcatgggaattctgacttctagtaaggaaaaatgacttattttacacagactttctgtaatagaagctggtgagtttgagttcggctaattacaaggagtgttgcagcttcctgtcactccccctcgcttaagtagattctcagttttcagatttttttttagaattaaagttattaacagactgtttccgctaagaataatttcgaagacagaatctgaaagaacatattaagtaataatcaggtcgggcgtgcctgtcaccctcagccctgcagacataagctaacgctagaccgttgggactggtctccagggaatctgtaagttgagacattggtcccctcattgtctcctatttaatggctttctataccagaagaagtaagtgtggattaaaagttaagctcagtttacccacagctatcttcactatattgagatttttggcttttcaaagaagtgaagtaggtgattgcccttggtaataggggcagaaaacatggggcaggctgcaattaacattttacattactcgtttagtgatgaaatagcttccagaaaacaaattcaggttctgtttggtgataatgttacatttaactacagagataaagttttaaacataatgatattttgtgtttttagtagagatggtgtttctgattgaattgagatccattgcattctaataaaattctatctaataatacttcaataagaatattaaaatagctactacttattgttctcccattatttagcaggctttgttgatactgattttttgttttgttttgttttttttttttttgagacagagtcttgctctgtcacccaggctggagtgcagtggtgcgatctcagctcactgcaacctctgcctcctgggttcaagcaattctcctgcctcagcctcctgagtatctgggactacagaagcacaccaccatgcccgactaatttttgtatttttagtagagatggggtttcaccatgctgatcaggttggtcttgaattcctgacctcgtgatccgcccgcctctgtctcccaaagtactgggattagaggtgtgagccactgctcccagcctgttgatactgatctttagggaatctttagaaccttggttcctttatcatgactgtaaattaatgtaaaacaacctgcaagtaatactaagttatcaatattcataattggtagacaaatgtgtcaaacattttacatgcattatctaatttaatatgcacaaaatcctatgacataggactgtggttctccatttttttaaatgaggaaactgactgttaactgacaaactgagagttaatctacctaccacaacttgcacaagcaaatgaaaattgttactgctcaaagcatttttgaaattcttttgagattacgtgtacgtagtttccatggcatgtaagaaaatcttggtcgggcacagtggcttaagcctgtaatcccagcactttgggaagccgaggcaggtggatcacctgagatcgggagtttgagaccagcctggccagcatactgaaaccccatctctactaaaaatacaaaaattagctgggtgtggtggcgggcgcctgtaatcccagctactcaggaggctgaagcagaagaatcgcttgaacccgggaggcagaggttgcagtgagctgagatcgtgccattgcactacagccaggggacaagagtgaaactccatcttggaaaaaaaaaaaaaaaaaagaggccgggtgcggtgactcacgcctataatcctagcactttgggaggccaaagtaggcagatcatgaggtcaggagttcaagaccagcatgaccaatatggtgaaaccccatctctactaaaaatacaaaaattagctgggcgtggtggcatgcgcctgtaatcccagctactcaggaggctgaggcaggagaatggcttgaacctgggaggtggaggttgcagtgagccaagattgcacgccactgcactccagcctggcgacaacgagactctgtccccccaccaaaaaaagaaaagaaagaaaatctcaccattaactaatcattctaactcccttcttcactgtaaactattaaattcaccttgattattttattaattgggtttagcactgaataactttaggggattcacagaaatcaaatataccctccaaagacagatttatccccagtgaaggtactcaaaagaatatgcaatttcaaaatatacccccaagagtatttaatggcagcattgttggaacaagaacatagctacatgcttaaagttattgttttgaaaggaatagcacccttttagaggtgtaaatcctgagaggtggtgaggtcagccatgttacttaactcttagccaacacaggtttaatactgagcatcctgaaatatgcgatagggaaagccaaacagaattactattgttttcgaaaagttgatttttaaaaaactgactttttagccaggagtgatggcgtgtgcttgtagtactagctacttggcaggctgaggtgggaggatctcttgagcctgggatttgaaggctgcagtgagcaatgattgtgccactgtactgcagcctaggcaacagagcgataccctatctctaaaaaaaacaaaaacaaaaacaaaaaaaccctggcttaatgttatgttaatatttacatctcagtgtttttaaaacataaagatcagttattttggccaggtgtggtggctcatgcctctaatcccagcaccgtgggaggccaaggtgggaggatcacttgaggccaggagtttgacaccagcctgggcaacacagcgagaccccatctctaccaaaaataataataataataaagatcagtaactacccaggccaaaacgcagtggctcaatttcagcctcccgagtggctgggactacagccacgtgccactgtacccagcccaagattagtaattttaaaattaaaagtaaattttaagcctcaagactgccagagaaagaaatgaactccttattgtcacagtgagctgaggagggacacttacagcctgagctggtgagttctcagcagccagcagtgcaagcgataggccgtgtgggccaaacaaaagtgaatcatggtgacactgggcccagagcacctggagcaagacaaggaggacccagggcagtcccgttagagtttccaaactgctgcacccattcatcaatcggccacagcccccctatacgcatgcgcatgtgccctgcaatgatatggaggaagtactcttcaggaaagggacagaccctagttctttaaaacccacttttggcagcaataggagctcactgtaaccttaactcttgtgtggctctgaaggtttagagtctggtgtgagctcgagttggctttgttaacagttagtggaactgtgagctggatatttgagacaagttatagatgtaacaagggagaaagacagcttcctttatgctgagagatcagcttcctccagcccttccacatcccttgggcatcacctggaaacctaagcttatccccaagtgtagggctaaaagctgtttgttccatccttccctgaagtctgcttcagaactgcagcagctcccttgaggacccacacctctcgaactcagccttacccttcttccatctctctcttgggaatagtaactgaaacctgagatgggcggggttgtctgacgccagctgtctgtctggtgccagctgaacccagcccctccaccagtctttgagagcatgctcagtggctggtggataccctgatttctctgtaggcctcagggtactatgggcatgtcgcattcatcaccccctcccataataccactggtagtttttatgggtatcgagggcctggggtagggataaagggtatgggtacaagccccaagtgaatcatggtatgatacttttgatggtaactgaaaggtaagacatttaaatcattcttagtgatgaactcatttttttctaatgccctagtgactactactgaaccttctccgttattccctaagaacagttagcagtgtccctgtgatcccaccactgtgccttctttcgagaaggccccaagtatatatatattttttgagacggagttttgctcttgttgcccaggttggagtgcaatggcatgatctcggctcgccgcaacctccacctcccaggttcaagtagttctgcctcagcctcccaagtagctgggattatgggcatgtgccaccatacctggctaattttgtatttttagtagagacggggtttctccatgttggtcaggctagtctcgaactcccaaccacaggtgatccacctgcctcgccctcccaaaatgctgggattacaggcatgacctaccgcgcccggaccccaagtatctttcttacttccatttccactgactatttgtggctgcttttcctatcttgtttcatcccgtccaatgaattccaaatcatcactgtcatcagtaacatcactttcctcaaaaataacagctgccgccgggcgcggtggctcacgcctataatcccagcacttttggaggctgaggcaggcggatcacgaggtcaggagattgagaccatcctggctaacatggtgaaaccccgtctctactaaaaatacaaaaaattagcccggcgtagtggtgggcgcctgcagtcccagctacttgggaggctgaggcaggagaatggcgtgaacccgggaggcggagcttgcagtgagccgagatcgcgccactgcactccagcctgggcgacagagcgagactccgtctgaaaaaaaaaaaaaaataacagctaccattcattttaacactgtgccaggcaatatgctaagccccttgccatgtttatcctcagaattaatcctcaaagtaactgagattggccttctcattatctccattttacagataaagaacctaaaaacagagttaagagatcaaatcaagatcacacaaccaaataagggttttttttttttttttttttttgagacggagtcttgctctgtagcccaggctggagtgcagtggcgcgatctcggctcactgcaagctccgcctcccgggttcacgccattctcccgcctcagcctcccgagtagctgggactacaggtgcctgccaacacacccggctaattttttgtatttttagtagagacagggtttcaccgttttagccaggatggtctcgatctcctgacctcgtgatccgcccgtctcggcctcccaaagtgctgggattacaggtgtgagccaccgtgcctggccccaaataagggtttttaacacccatgtcatattattttgagaaccctgttgtcactcctttgctcagaaaccttcaaaggttcccattgtccaaggggttaaagtttatatttctcaactccttagctatgagagggctcaattccaatctacactgttccagtttatctcccatttttcttcttggtgagagagcttaagagtcaggaaacctaaattctagtcctgatgtgccattcactagctttgtccactgacagcataaaatctgaacaaaagcaagttggtcagcctagcagttatgtctgactactattgggctacaaatgaacagtcttgacacaggtgttttcagtattgccaagtcttagatgtacacagtgaggcattgcatagccttaatttccagatttatttttaacccactatttctttttttttttttccaagatggcgtcttgctgtgtcccccagtctggagtgcagtggcacaatctaggctcactgcaacctccatctcccgggttcaaacaattatcctgcctcagcctcccgagtacctgggattacaggcgcacaccaccacgcccagcgaatttttgtattttttagtagagacggtttcaccatgttggccaggctggtctcgaacttctgacctcgtgatccgcccacctcagcctcccaaagtgctgggattacaggcgtgagccaccgcatctggcccccattatttcttttttgagatgtttgtaatagtgaaaaattagaaaaacctaaatatccaaaggtcgaagattaactggaaaaactgaattaactatagattatcatttggaacatgctaattgcttttggccaagttatttttttgcagtgagaatcaaatgacaatgtgtatgaattttattttattttattttatttttgagacagagtctcaccctatcactcaggctggagtgctgaggcgtgatctcagctcactgcaacctctgcctcctgggttcaagtaattcttgtgcctcagcctcccaagtagctgggattacaggcaccagccaccacacctggctaatttttatacttttggtagggatgggatttcaccatgttggccaggctggtctcaaactcctggcctcaagtgacccacctacctcggcctcccaaagtgcagggattacaggtgtgagctaccacaccgggccgaaagtatttttataaagccaggtgtggtggttcacacctgtaatcccagcactttgagaagtgtaggtgggaggatcacttgagcccttggtcttgaaatcctgggctcaagcaatcctcccacctccacttcccaaagtgggaagcagagcctgggcaacaaaatgagactccttctctacaaaaaaatagaaagataagctgggtgtggtgatgtgtgcctgcagtcccagctacacgagtagctgaggcaggaggatccttgagcccaggagatcgtggctgcagtgagccatgttcaagctaaacctcccagctttcccagcctgggtgacagaacaagaccccgtctcaaaaagaaaaaataaaagtattctatacttttgtttttgtaaaccaaaagtagcatataactattgatgtgtttattgtcatttgctatatttctatgttaattataaaaatgcttcaagcggccaggcacggtggctcatgcctctaattccagcattttgggaagccgaggcaggcrgatcatgaggtcaggagatcaagaccatcctgggctaacacggtgaaaccccatctctactaaaaatacaaaaaattggccagcatggtgacgcacgcctgtagtcccagctactcgggaggctgaggcaggagaatcacttgagccagggaggtagaggttgcagtgagccaagattgtgccactgcactccaacctgggcgacaaaaaaaaaaaaaaaaaaaagcttcaagctctacaaaaaattccccaaagttttgaaaatactttgagcaagattatgtcactggaattatatttataagatctcagggccaggtgtgttggctcatgcctgtaattccagcactttgggaggccgaggcgggtggatcaccaggtcaagagatcaagaccatcctggcgaacatggtgaaaccctgtctctactaaaaatacaaaaattagctgggtgtggtggcgtgcgcctgtagtcccagatactcaggaggctgaggcaggagaatcgcttgaacccaggaggcggaggttgcagtgagctgagattgtgccactgcactccagcttggcaacagagcgagactccatctcaaaaaaaaaaaaaaaaaaagatctcagaatgattatttttaagacattctttggatatataagaatatttattactttttaatttttatattattgttgttattttgagacagagtctcgctctgtcacccaggctggagtgcagtggtgcagtctcggctcactgcaacccctgcctgccaggttcaagtgattctcctgcctcagcctcccaagtacctgggattacatgtgtgcgccaccacactcgctaatttttgtatttttggtagagatggggtttcaccatgttggtcaagctggtcttgaactcctgacctcaagcgatctctctgctttgacctcccaaagtgctgggattacaggtgtgagcaaccgcacctggccaagaatatttattttgaagtccaagcacagtagctcatgcctgtaatccctttgagaggctgaggcaggaggccaggaatctgagacccaccttgacaacatagtgagaccctgtctctgcaaaagatttaaaaaatatagccaggtgtggtggcatgtgcttgtggtcccagctacttggaggctgaggcaggaagatcatttgagcctaggaggcagaggctgcagtgacctgtgatcatgccattggactccagcctgggcaacacaccgagatcctttctcaaaaaaaaaaattttattcagaagtatttggctgggcacggtggctcacgcctgtaatctcaacacttcgggaggctgaagcagtcagatcacttgaggttaggagtttgagaccagcctggccaacatggtgaaaccccgtctctaccaaaaatacgaaaattagccaggcatggtggggcatgcctgtagtcccagctacttgggaggctgaggcaggagaatcactgtaacctgggaggcagaggctgcagtgagctgagatcgtgccactgcactccaccgtgggcaacagagggagactccatctcaaaacagaaagaaattatttataaatattattgaccgggcgcggtggctcacgcctgtaatcccaacgctgtgggaggctgaggcaggcagatcacctgaggtcaggagttcaagaccagcctagccaacatggtgaaaccccatctctactaaaaatacaaaaattagctgggcatggtggcaggcacctgtattcttagctactcaggaggctgaggcaggagaatcgcttgaacccaggagatggaaattgcagtgagccaagattttgccactgcactccagcctgagcagcagagtgagacttagtctcaaaaaaaaagtatgtatatataattatatacaaatatttatttgaaaacctttacaatagcaaagttatttttttaacttgttgaaaactagtaggcagcatttaaaaggttctgtacaatgaatgaaaaagatactgtcatcactgggcattccagagtactagggataagataatatactacacatcttctagaaagtaaaagcaggttacacataaaggaacaaggattagaatgacctcagactttcaacagcaatgttgaatgccagcaaacaatgaagaagtgcctttataatcttaaaagaataatttcaaaaattatttgggctgggcacagtggctcgagcctgtaatcccaacactttaaaaggccgtggcgggcagatcacctgaggtcaggagttcaagaccaacctggccaaagtggtgaaaccctgtgtctactaaaaatacaaaaattagctgggcatgttggcaggcatctataatcccagctactcaggagggtgaggcaggagaattgcttaaacctgggaggcagaggttgcagtgagccaagatctttccactgcactccagcctgggtgacagagtgaaactaagtccccccggctccccgcaaaaaaaaaattatttgaaattattgagttgaaaagaattttctcaagccattaataattgaaggaagaataacaacatcgtcgaacttacttgatctcccatgcgcctatcaaacttacttgatctcccacgaatcctactggagcatattctcaagtagtttcatgataaagggtgtatgagagatcaaccctttatcatgaaacgcttgaggatacgctccagaaagattagaaagcaaagcragaaataaataggggatctaacccaggaaagagatgaagaagttttcagaataatagcttcacaaatagagatttttcatctggataagaggaggagagttccagraagaaaatcctctgggaaaaaaacagattgaatagaatagcaattgtaaattaaaccatttgaaattgatgttttgttgattaaaaaaaaaattgcttgctgagcacagtggctcatacctgtaagcccagcactttggaattggccaaagtggacaggttcgcttcgagattctgagcccaggagtttgagaccagcctgggcaatatggcaaaaccccatctctacaaaaaatacaaaaaaacaattagccagtgcatgcctgtagtcccagctgcttgggaggctgaggtcgaaggatcacttgagcctgggagatggaggttgcagtgagctgagattgtaccactgtactccagcctggacaacagagtgagatactgtctcaaaaatcaaaaaacaaaagacaattctagtaacataatttgcaacattcataatagctatattcatagcatgtttgctatttgccaaatgtagtttttttttttgtttttttttgagatggagtctcgctctgttgcccaggctggagtgcagtggcacgatcttggcttgctgcaagctccgcctcctgggttcacgccgttctcctgcctcagcctcccgagtagctgggactacaggtgcccgccaccacgcctggctaatttttttgtgtttttagtagagatggggtttcaccatgttagccagggtggtctcgatctcctgacctcgtgatctgcccatcttggcctcccaaagtgctgggattacaggcgtgagccgccgcgcctggcctgccaaatgtagttctatgtcttggatctgtattgtttcatttaatcctcacaacaatcaggaggtaggtagtattattttctcctttttaagattgattaaaaactgggacaaggtgggcactgtggctcatgcctgtaatgccaatactctgggaggccgaggcaggtggatcactaggatcacaggtcaggagatcaagaccatcctggctaacatggtgaaaccccgtctgtactaaaaatacaaaaaataattagccaggagtggtggcgggcacctatagtcccagctactcgggaggctgaggcaggagaatggcatgaacccagtaggcggagcttgcagtgagtcgagatcatgccactgcactccagcctgggcgacagggcgagactctgtctcaaaaaaaaaaaaaaaaaaattagccaggtgtggtggcacgtgcctgtaatcccagctacttgggaggctgaagcagggaggattgcttgaacctggaaggcagaggttgcagtgagctgagatcgtaccactgcaccccagcctgggtgacagagcgagactctgtctcaaaaaaaaaaaaaaaaagccaaagaaaaaacctggcacaaaaggaaggttaagttagggttaggttgcccaaggtcatgccgttggagctgcaatttgaagccaggcagcctaatatcagagcataggctcttaactcttctgttatataggcgggaaattgtaggatactttcttgtagagtctgactaatccaagcaaaaagacctgcggtactgacaggttactgaacagttatggcccctgtgcacaagccctacctacccactcagcctgtcccatcagctctttttgaagaaactttaaaatatatcatgaatattggtagagaaatagagatgataatctgttggggaaatgagtagaataccataaacaggagtattcagaggatagggctcttggaaattaagagtgtaatggcagaagtgaaaactaggcagattggaggatgaagttgaggctatcaggaaattagagcatgaaggcaggaggtggaaaatacagaaaaaatgattagatgcttcagctctaaataatagacattttcaggccaggcacagtggttcatgggcggctgaggtgggtggatcacttgaggccaggagttcgagaccagcctagctaacatggtgaaacccatctctactaaaaattcaaaagttatctgggtgtggtggtgcatgcctgtagtcccagctacttgggaggctgaggcaggagaattgcttgaacctgggaggtggaggttgcagtgagctgagatcgtgccactgcactccagcctgggtgagagagggagactctgtctcaaaaaaataaataaataatagacatttcaaaagaacagataaaatgggaggcagaaaatcatcaatgaaagaactcaaggacattttctagaactgaatgttacgagtttccagactgaaaggacctgcttgccctgtgctcagcatgatggatagaaacaaagctgcactagaggacagcactgtgaaatttcagaacactgcrgacaaagagaagaccttacatgcttcaagacaggaaaaaaatgacattcaaaagctccggaattagaagtggctttggatttcatgctattaacattggaatctagaagtaatgcctttgaagttgtgagagaagatgattttcaacatagtctggagataaactatattgggcagtttgggagaaggtagtcaaagggtatgagggctaatctttatagatcataaagtcaatgggcactgttatagttggataaattaagaaatggcattataagcacataatgtagagttatggtagaaactaccagaagaaatagctgaaaaagttaaaagtggttggatggaagggatgatgagtggaatatgattgatggctgttggttttcattaagggccttttttaccctgtgatgttctagatctatatatatgaattagttgaataagaaattttaggccaggcgcagtggctcacgcctgtaatcccagcactttgggaagctgaggcaggcggatcacaaggtcaggagatgaagaccatctaacatgatgaaaccccgtctctactaaaaatacaaaaaattaggcaggtgtggtggcaggcacctgtaatcccagctactcgggaggctgaggcagaagaatggtgtgaacctgggaggcggagcttgcagtgagctgagatcgcgccaatgcactccagcctgggcaacagagtgagactcccgtctcaaaaaaaaaaaaaagaaattttaataaaaacctaaaattggatgccttatgttacttcattagggttatggaaggatcagtggaataactgatatgaaaaagaggtttgtaaattatattctattatttagtggaaagttatgatgttactatcatgttgactaaaaggcaaaaatgctgtatttggtagatgataatattgttgtattaattaactgtggccacaatagtgcaatcacaaaacttgagtgacatatgataatgaacactaattttttgtttttgagactagggtcagcttgttggcttgacgatctgagccaggtttggttgatctcacttgggtttgcttatgtgtctgagcagatggactgtagttggctggtcggggatggctatgttccccacatgtggggtggttgtctatcagtgggagcatcggtgctctcccacatgttctggcatcctccacactaacacttgtgccacattcttttgcccaaagcaagtcaaaaaatgtggagaagtcacttccatctcttcatggtagaagttgcaaattcacattgaaaaggagggatggagatgtggaaacatttttagagttagcataatgattgaagccaattttttttttctttttgagatggagtctctctctgtcgccaggctggagtgcagtggcacaatctcggctcactgcaacctccgcctcctgggttcaagtgattctcctgcctcagcctcccaagtagctgggattacaggtgcctgtcaccacacccagctaatttttgtattttttgtaaagacgaggttttaccatgttggccaggatggtcttgatctcttgacctcatgatccacccgccccagcctcccaaagtgctgggattacatgtgtgagccaccacgcccagccaaagccaaatacttttaatccatctattgggaatgagaatgtggaaggacatcaaaagacctataactgggctgggcgtggtgactcatgcttgtaatcccagcactttgagagactgaggtggaagggttgcttgagaccagtagtctgagagcagcctgggcaacatagcaagacccccatctctacaaaaattagtctttaaaataattagccagcctattggtatgtgcctgtgttcccagctacttgagaggctgaggtgggagcatcacttgagcccagaagtttgagggtgcagtcagctgtggttgcatcactacactctagccagggtggcagagcaagaccttatcttagggaaaaaaaaatgcataactgaatttattttctttttcctttgtagacaacaagggaggtgtcacagttttccatttagatcaacaacttcaagttcttaccatggaaaattccgagaagactgmagtggttctccttgcttgtggttcattcaatcccatcaccaacatgcacctcaggttgtttgagctggccaaggactacatgaatggaacaggtaggagcagtaaccaaaagtggcttaagactagagaaccagccgggtgcagtggctcacacctgcaatcccagcattttgggaggctgagacgggcagatcacaaggtcaagagatcgagaccatcctagccaacatggtaaaaccctgtctctactaaaaaatacgaaaattcactgtgcctgtagtcctagctactcgggaggctgaggcagtagaatcgcttgaacccgggaggcggaggttgcagtgagctgagattgctgcactgcactccagcctggagacagagcaagacaccatctcaaaaaaaaaaaaaaaaatactagagaaccggcatgactgggtctgtttcagaatacacatttcattgactgggcacaaacatgctgtcctgctcccttgtacagtgaattcttagccaaaaaagagggtgaagtatgagggaagaattgagcatctggctatggcctgtagaatagaaaatacagccaggtacagtggctcacacctgtaatcccagtgctttgggaggccgaggtgggaggatcacttgaggccaggagtttgagaccaacctgggaaacagagagagacctcatctctacaaaaaaaattgtaaacattagccaggtatggtggcatgtgcctgtggtcccagctactcaggagactgaagtaggaggattgcttgagcccgggaggtctaggctaccgtgagccatgattgcacctttgcccaccagcctggacatcagagcaagaccctgaccacccctccccaaaaaaaggaatttgattctgtcatgcctgtgcttaatcttctttaggagtttcccattacttaaggcaaaaagcgaaagcttgtactttagcatacataaaacctctaggatcaggcacagctttttaaaagttttcttttttctttctttctttcttttttttgagatggacttcactcttgttgcccaggctggagtgcagtggcgcgatctcggctcactgcaacctccacctcctgggttcaagcaattctcctgcctcaccctcctgagtagctgggattacaggaatgtgccaccacgcccggctaattttttatatttttagtagcgacggggtttctccatgttggtcaggctggtctcaaactcccaacctcaggcttcccaaagtgctgggatcacaggcatgagctaccatacccagctaaaagttttcataaacaatgcatgaggctgggcgtggtggcttacgcctggaatcccagcactttgggaggccaaggcaggcagatcacaaggtcaggagattgagaccatcctggctaacacggtgaaaccccatctctactaaaaatacaaaaaaattagccgggcatggtggcgggtgcctgtagtcccagctacttgggaggctgaggcaggaggatggcgtgaacctgggaggcggagcttgcagtgagccaagatgtcgccactgcactccagcctgggtgacagagcgagactccatctcaaaaaaaaaaaaaaaaaaaaaaaaatgcatgaataggctgggcgtggtggcacatacctgtaatcccagcacttcgagaggcagaaggggcagattacctgaggtcaggagtttgagatcagcctggccaatgtggcgaaaccttgactctacagagtctcgctctgtcgcccaggctggagtgcagtggcacagtcttggctcactgcaacctccacctcctggattcaagcgattcttttgcctcagcctcccctgtaactgggattacaggcacacagcaccatgcccggcccatttttgtatttttagtagaaatggggtttcaccatgttgaccaggctgctcttgaactcctgttctcaagtgatcctcccacgtcggcctcccaaagtgctggaattacaggcatgagccaccataacatagcataaccataacagtttcatgtgtatccttccactcttctttgtatgaatttatatgcaaacatttgtgtgtatacacagatttttttttttttttgtggaaatggttctcactctgtcaccctggctgggcaggctggagtacagtggcatgatcacagctcactgcagcctttacctcccggactcaagtgagctgcctgcctcaggctcctgagtagctgtgactacaggcatgccaccacatctggctaattttttttttttttttggagacagagtcttgctctgtcgctcaggctggagtgcagtggcatgatctcagctcactgcaaactccgcctcccaggctcacaccattctcctgcctcagcctccggagtagctgggattacaggtgcccgccaccatgcctggctaattttttgtatttttagtagagacagggtttcaccgtgttagccaggatggtcttgatctcctgacctcgtgatccacccgcctcgaactcccaaagtgctgggattacaggagtgagccaccgcgcctggcctaattttttaattttttgtagaaactgggtcccactgttttgcccatgttggtgttgagctcctgggctcaagtgattctcctgccttggtctcccaaaacactgggataacaggtgtgagccaccacacctggcctcgatttttttgttacataaatgatcatataatatgctgataggtagatggatggatggatgctaaagctcactatttgcctatgacattgagaaatgggcttttgcatacatctaggtggacaatacaaattaaggctttttacaaagtaatttggcaatatcaatagaaatttaactgtataggggaatgaggtgaagtacagagtgtcagttggggaagatgagaaaattctggagatagataggagcgatggttgcacaacagcatgtttgcagttaatatcatagaactgtacgcttgggtatattttaccataatttcagtcagttaattgatcagctaataagctggaatccctaaagaaagagaatctgtgattataaaacaatattggccaggtgtggtgactcatgcctgtagtcccagcactttgggaggctgaggcaggcagatcacttgaggtcaggagttggagaccagcttggctaacatggtaaaaaccccatctctactaaaaatacaaaaattaaccagcatggtggcatgcgcccgtaatcccagctactcaggagtctgactcaggagaatcgcttcaacccaggaggcggaggttgcagtgagccgagatcactccagtgcggcctggggaacagagcaagactctgtctcaaaaaacaaaacaaaacaaataatattgatcgtaatatttcctgtgcataaagtctaatttgttatacctagtgtgaaacctaactttttatctaggaaggtacacagttgtcaaaggcatcatctctcctgttggtgatgcctacaagaagaaaggactcattcctgcctatcaccgggtcatcatggcagaacttgctaccaagaattctaaatgggtggaagttgatacatgggaaagtcttcagaaggagtggaaagagactctgaaggtgctaaggtatttatggtgtaatcaactttgtcagttctgtgtaaatggctaagcggcttatgtttttaccatgtttcaatgttgcttacatctgtgaacatacagatttgcaaaactgtcacgtgtgttgtaagccattcctgtggaaggttactacaagactgtagagcacagcaccaaaggatgggtcttccttagcccctctgtgtctttcattatgttttaagttgtttgcggccaggcgcggtggctcacgcctgtaatgccagcactttgggaggctgaggcgggtggatcagctgaggtcaggagttcgagaccagcctggccaacatggtgaaaacccgtctctactaaaaatacaaaaattagccgggcatggtggcgcatgcctgtaatcccagctacttgggaggctgaggcaggagatacacttgaaccccggggatggaggttacagtgagccaagattgtgccactgcactccagcctgggtgacagagcgagactccatctcaaaaaaaaaaaaaaaaaaagatgtttgcttgcttgctactatgtgataccactgttagaaaatagaggaagcctgcctgggctttctgtgccccaaatgagaaagggaaaattgcaagaagatgttattatcatcagtcttcctaagtataaaagagacaggcagataatttaaggaagagaagcatccagtgctgcttgatcatggacaggcctgattcgtgtgctgcttccatgacagcatctgggcagggagtcacagatctctgtgcccatacctttgaagcagttctagttaagggttcaaaaaccagagtaagtgacatctaattatttctcttttttttttttctttttgagacggagtctcgctctgtcacccaggctggagtgcagtggtgcattctcggctcactgcgacctctgcctcctgggttcaagcaattctcctgcctcagcctcccaagtagctgggactacaggtgactgccaccacgccccgctaatgtttttgtatttttagtagagatggggttctaccttgttggccaggctggtcttgaacttctgacctcaggtgatccacctgtctcagcctcccaacacctaattatttcttttcttttctttttttttttgagatagaggttcactcttgttgcccaagctggagtgcaatggcatgatcttggctcactgcaacctctgcctcccgggttcaagccgttcccctgcctcagcctcccaagtagctgggattacaggcgcctgccaccacgcccggctaatttttgtatttttagtagagctggggtttcaccctgttggccaggctggtcttgaactcctgacctcaggtgatctgcccatctcgggcctcccaaagtgcggggattacagaggtgagccaccgcacctggctgacacctaattatctcttaatgttattttgatttttttaaactttattttcttttttttgttggagatggggcctcgctatgttgcctatgctgactgatctcaaactcctggcctcaagcaatcctcccacctaggcctcccaaagtgctgggattacaaatgtgagctaccatgcctggcctgttgttatcttgagtttawaatgaaagggctttctgaaaagcctttctgtttagtatctgttcttagagttctgaactttccagtgactgactgtatcatttagggttcagactaggaaatagaaacccactctggatattttaagtggaaagagatttaagtacttaggcaaaaagtacttaaaagagctgaggccgggcgtggtagctcatgactataatcccagcactttgggaggctgaggccggcagatcacctgagtccagtagttcaagacaagcctggccaacatggtgaaaccctgtctctactaaaaatacaaaattagctgggcccatacctgtaatcccagctactagggaggctgaggcaggagaattgcctgagcctgggaggcagaggttacggtgaactgaaattgtgccactgcactccagcctgggcagcagaatgagactgtctcaaaaaacaacaacaaaaaaaagtaaaagggctggagaagtggaagtcagggtcactcctccgatgttgccgtcagagttcaacaaaccaattccgcttctgctgctattgaactgtctcagtctcctgaagttggtgacggacagtggactccagcgtctagccaccacacccacactagaaaggattactggctataaatagcgcaataataggatcaggccgggcatggtggctcacacctgtaatcccagcactttgggaggccgaggtgggtggatcacctgaggtcaggagatcgagaccaccctggccaacatggcaaaccccgtctctactaaaaatacaaaaattagccaggcgtggtggcacatgcctatagtcccagctacttgggaggctgaggtgggagaatcccttgaacccgggaggtggaggttgcagtgagccgagattgcgccactgcactccagcctgggtgacagagtgagactccgtctcaaaaaaaaagattacttgtcaggctccacagtcccaggatgatggcctctgtcctccttctgccttccaaatctctcaggagagaatctcattagcagaaatcgcagtcaagtccacagcctgctgcaaggacctctgggaagtgtgttgggcaggattgggcactgagtcagtaggaagtatctcacacagtgatctctcaagaggacttccttttcagacttggcagggagaagagtctccactgcttgatggcaaaaaattctcccatgagggagcaagttcctgggccacagccctacccgaccctctggctttatagtaaccttattgcccattaaatagtcaactcagctgctcagaagggttgggatgtaggggaataaaggcccacagttggatcccacaagtgtagttgatgttatttgggtaacattgcacagtttgaaaacagtgggcaccctgctgccagcccagaatagagctatacacaaatcctgcttagggccccttcctttaaggcctcaggcccttgccgctctaggaccttctccttggcgttctggttctttgtcacaagattaagccacactcttccatggtcaagagtgtgggctctggaccagactgctggggttcaagtcctggctctgctattaatacttttaagttaaatgaccttaggcaaattagtcagtgtcctctgtcaatggggtaataaacaattctgatatgagagatgagcagcacattaaaaccagaagtattttcagtgaaactagctgcaaggtggcagtaatatagtcgctttgtaataaccaaaatgttcaggctgatcatggtggctcacatctatagtcccagcactttgggagtctgaggcaggaggattgcttgaggccaggagttcaagaccagtgtgggcaacatagtgagacctcatctctcmaaaaaactaaagttagctgaacatggtggcacgtgcctgtagtcgcagctatctgggaggctgaggcggtaggatcacttgagcccaggagttttggttgcagcgagctatgattgtgccactgtgctccatcctgggcaatagagtgagcctgtgtctctgaaaaacaaaccaaaaaaaccccaaaacattcactcaatcaaattgttattgaggctgggcgcagtggctcacgcctgtaatcccagcactttgggaggcctaggcgggcagatcacaaggtcaggagatcgagaccatcctggctaacatggtgaaaccctgtctctactaaaaatacagaaaaaattagccgggcgtggtggtgggcgcctgtagtcccagctactcgggaggctgaagcaggagaatggcgtgaacctaggagacggaggttgcagtgagctgagatcgtgccactgcactccagcctgggcgacagagtgagactccatctcaaaaaaaaaaaaaaaaattgttattgaatgcctcctcatagactctgctaggagctggagtagcaactgtaagcctcctttctccttcccttacggagataataatatttatgatataggatgttgagaagattttttttttcttttgaggcggagttttgctcttgttgcccaggctggagtgcaatagcgcaatcatggctcactgcaacctccacctcctgggttcaagcgattctcctgcctcagcctcccgagtagctgggattataggcatgtgccaccacacccggctaattttctatttttagcagagacagggtttctccatgttggtcaggctgtgtctcgaactcctgacctcaggtgatccacccgccttggcctcccaaagtgctgggattacaggtgtgagccaccacgcccagtcgagaagatttttaattttttttagtcttccacaacagtcatcttatgttgagaagacttaatcagataatccatgtaaaggattcagtgtaatgtgtggcatatgataaataatgttggccaggcacctataatcccagcactttgggaggctgaggcgggcagatcgcttgaggtcagaagttcaagaccagcctggccaacatgatgaaaccccgtcgctactaaaaatacaaaaaaaattggctgagcgtggtggtgcgcccctgtaatcccagctgctcgggaggctgaggcaagagaattgtttgaacccaggagccagaggttacagtgagctgagatcacacactgcactcagcctgggcgtcagagcaagacaccatctcaaaataataaataaataaataatgttaatgatattcttttttttttctttttttgagatggagtctcactctgtcgcccaggttggagtgcagtggtgcggtcttggctcactgcaacctctgcctcccaggttcaagtgattctcctgcctcagcctcccgagtagctgggattacaggtgcccgccaccacacccggctaattttttgtatttttagtagagacggggtttcaccgtgttagccaggatggtctcgatcttctgacctcgtgatccgcccacctcggcctcccaaagtgctgggattacaggtgtgagccactgtgcccagctataaataatgttaatgatatattctaatggagcatgtgagaaagagaaatattctattgttttgttgttttatagacaccatcaagagaaattggaggctagtgactgtgatcaccagcagaactcacctactctagaaaggcctggaaggaagaggaagtggactgaaacacaagattctagtcaaaagaaatccctagagccaaaaacaaaaggtttgtatgttttagcaggacccacggactagagttgataagattctgtagctgagcaaacccctgtgtatttttttttttttagatggagtctcgctctatcacccaggctggagtgcagtggcatgatctcagctcactgcaagctctgcctcctgggttcatgccattctcctgcctcagcctcctgagcagctgggactacaggtgcctgccaccacgcctgtctaatttgtttgtatttttagtagagacggggttgcaccatgttagccaggatggtcttgatctcctgacctcatgatccgcccacctcggcctcccaaagtgctgggattacaggcgtgagccacagcgcctgggccttattttttttgttttatagagatggggtctcactattttggccaggttggtcttgaactcctggccccaagcagtcctcctgccttggcctcccaaagtgttaggattacaggtgtcagccactatgcctggcctttattttcattttatattgcatacttgtgggtgtctggaaaatgccccttgttagttgcatgaagtgaaggagaataaaaggcacttggagcttatttctcctgcagtggtctctaatctttgaggtgtcctgggtctcttttgggaatctgattctcataaaataaaagctcataaaaactgtgaactgtcattctttttttttttttgagacagagttttgctcttgttgcccaggctggagtgcratggcacaatctcggcttactgcaacctctgcctcccgagttcaagtgattctcctgcctcagcctctcaagtatctggggttacaggcgtgcgccaccacacccggctaattttgtatttttagtagaaacggtatttcaccatgttggtcaggctggtctcaaactcctgacctcaagtgatctacccgcctcggcctcccagagtgctgggattacaggctagagccaccgcactcggcctaagccctcatccttgaaaagcacatacgtatcttcattttgatacagtgggttattagaaaagtaaacccctttccacttggaggaggtagaggggaagaaaaagcataccccaaagctctgttttattcttcccagctgtgccaaaggtcaagctgctgtgtggggcagatttattggagtcctttgctgttcccaatttgtggaagagtgaagacatcacccaaatcgtggccaactatgggctcatatgtgttactcgggctggaaatgatgctcagaagtttatctatgaatcggatgtgctgtggaaacaccggagcaacattcacgtggtgaatgaatggatcgctaatgacatctcatccacaaaaatccggagagccctcagaaggggccagagcattcgctacttggtaccagatcttgtccaagaatacattgaaaagcataatttgtacagctctgagagtgaagacaggaatgctggggtcatcctggcccctttgcagagaaacactgcagaagctaagacataggaattctacagcatgatatttcagacttcccatttggggatctgaaacaatctgggagttaataactggggaaagaagttgtgatctgttgcctaaactaaagcttaaaagtttagtaaaaatcgtctgggcacagtggctcacgcctgtaatcccagcactttgggaggctgaggcaggtggatcacggggtcaagagatcgagaccatcctggccaatatggtgaaaccccatctctactaaaaatacaaaaattagctgtgtgtggtggcacgtgcctgtagtcccagctacttgggaggctgaggcaggagaatcacttgaccccaggtggtggaggttgcagtgagccaagattgcaccattgcactccagcctggcaacagagcaagactctgtctcaaaaaaaaaaaaaaatttagtaaaaatcaatggtaagctaaaataagtttttgtttgtttatttgtttttgagatggagtctctactaaaaatacaaaaaattagccaggcatggtgccgcataactataatcccagctacttgggaggctgaggcaggagaatcgcttgaacccgggaggcacaggttccagtgagccaaggttgtgccactgcactccagcctgggcaaaaaagcaaaactccatctcaaaaagaaaaaaaaaaaagaccgggtgtggtggctcacacctgtaatcccagcactttgggaggcctaagtgggtggatcacgtgaggtcaagagttcaagaccagcctggccaatatggtgaaaccccatctctactaagaatacaaaaaattagctgagcatggtggtgggctcctgtagtcccagctacttgggaggctgaggcaggagaatcgcttgaacctgggaggcagaggttgcagtaagccaagatcgtgccattgcactccagcctgggtgacagagcgagactccatctcaaaaaaaaaaaaaagcctgacagctagcaggtttcaggatccatctgccaagttagtgaaaggctggagcctcaaatcatacagatgagggtcattttctcctccttagcttcttggagtttaagagttgaaggagtcctgaaaagtaatgatagagcaagatgaagctatcagaactgaatttggacttcctctgggaaactacacctagttcatctgaagtgtcacgtaaactgcagaaagtttccaatgctggaaacttctctcatactatcgtgccttcctactcagaagtgcctgtgccctgctcagctgtgactactgacctcaggacctcactggacaaggcatgtggggacccttgcaggagccctggtaagggtacaatgatcctattgttttttgtttttgagatggagtctcactctgtctcccaggctggagtgcagtggtgcgatctccgctcactgcaacctccgcctcccgggttcaagcaattctcctgcctcagcctgctgagtagctgggattacaggcacccactaccatgtccggctaattttgtatttttagtagagatggggtttcgccatgttagacaggctggtcttgaactcctgacctcaggtgatctgcccacctcggccttccaaagtgctgggattacaggcatgagccactgcacccagcctgatcctattgttgcactatttatggagcaacaactttgtacaaagaacaagctttgtacagagaacaagcttggctttttctcccaacgccgaggatgctgttgatgctgccacgtaatagcataattttgggtgtcctcaaggacagaacttccactttgaataatggaagttagaacaatgaatttcacaggggaataaatattaatgactgacgtgaagaaaatatgccattgtttattccctcctgcatcatttccataatttgcttttgtactgtcaatttagaggaaatgtgtgatgctggtgttttgtttggcctgtttgtttgatgctgggggttttatgtgttgtaccctttaccccttacattgtgtaatttgaaagtggcaaacaaacctgcagtaaaagtccttgattggcatcttcattcggatgatggagagcctttgtggtagtgtttgcttatgtgaacagcaggcctttcagataagagaagtggcttttccttggtgatgaaggggtagagattgagccatggggatggtttaggttaaagaatgcttttttttggccatcatgaggatctaacaacagagtagaaggaaggatgccctaggtcagcatgcagggtggtgggagggctttcatcttccttacccaagcctctcttttcacttttctagaagtccagaagttgttatatgatgaaatagcctcctttaacgtttatttctgggtgccaagggaggcccattcctctaacattctcataatttttctcaaaggcctatgatctaaacatttcaccacggcatccactcagctgtgaggctgcgtacacagtctccacctctgaaatctgaacttcgtttaccagtggtgctgtttgaacttcataatgtcagcacttcctgaacacttactgtgtgcttggcttgtgctcctgagtgccttatatcataaggaaacggcaaaatcaggggactggtataaatggtgagctgagcttgaatctaagctttgtcttcagagccagtacccctaatctctctttctgtaaaatattacttttcaaagaatgaagttgtagccaaatcttgaaatttttcatttaccctaagtgaggacaaataaagctttcaacaacagtttgtggtagtctgatggagatgagtccgacgtattcagtcctcacggaaggactaggctgaacttgcccagtgttagcaattccttggaactagaacagtggaatccgagggagaaggtgatatgggccataattaacttttgtgtttgtgtgtgtgtgtatgtgtgtgtgtgtttgcttctgagacagttttgctgtgtcacccaggctggagtgcagtggcacagtctcggctcactgcaacctctgcctcctgggttcaagcaattctcctgcttcagcctcccaaggagctgggattacaggcgtgtgttaccacgcctggctaatttttgtatattcagtagagacagggtttcaccgtgatggcaaagctggcctcaaatgatccgcccaccttggcctcccaaagtgctggaattacaggtgtgagccatcacgctctgcccagatagggtttttgacctgtcatagtggtgcctggtcccattattctctgttttgactctgcagggatgatcactgtccccttgctatcctttaatgaaactgtcacctcggtttcagaactggaattcagatccatttctccctcacgtgtcttaccaagtctaaatgacttgccgtggacagtatttcccaaatcaagttaagctgcccaataaatttttccaaaacaatggataacctgacaattacattgtaaaacattagggaaaatagcaaacacacaaaattagtggtaatagtataatgagcccctacgtacccattaacttcaagcataacattttgccaatcttcatctacacctgttttgttttgctggagtcttttaaagcaaatcccaaatgtgtaattttacccataaatacttcagtgtgaggaatgctagagtccaatttgtacattaatacaagtatatcagctagcgccggcgtggtggctcagccaggcttggtggctcacatctgtaatcccagcactttggaaggccaaggtggaaggattgcttgagcccaggagttcaagaacagcccgcgtaacatagcaagatcctatctttagaaaaacaaacaaataaacaaaaaacatgtactggctgggcacagcggctcatgcctgtaatcttagaaatttgggaatcagaggcagcagattgtttgagcccaggaattctagactagcctgggcaacatggcaaaaccctgtctctaccaaaaatacaaaaattagctgggtgtggtggtgtgcgcctgtagtcccagctactcaggaggctgaggtgagaggatggtttgagcacaggaggcggaggttacagtgagctgagattgcgccattgcactccagcctgggtgacagagccagaccctgtctcaaaaaacaaaacagggctgggcatggtggctcagcctgggcacagtggctcacacctgtaatcccagcactttgggaggccaaggtgggtggatcacctgaggtcaggagttcaagaccagcctggccaacatggtgaaaccctgtctctactaaaaatacaaaaaattatacgggcgtggtggcgggcacctgtaattccagctacttgggaggctgaggcaggagaattgcttgaacccaggaggcagaggttgcagtgagccctgatcatgacactgcattccagcctgggcaacaagagcaaaaactccctctcaacaaacaaaaacaaaacaagtgtactaagtccagtgcggtggctcacacctgtaatcccagcactttggaggccaagacaggaggagcacttgagcccagcatgagcaacagagtgagaccctgtgtctacaaaaatttttttaaaaattagccaggcagcagggcgcagtggctcacgcctgtaattccagcactttgggaggccgaggagggcagatcacaaggtcaggagatcaagaccatcctggctaacacggtggaaccccgtctcactaaaaatacaaaaaattatccgggcgtaggtggcgggtgcctatagtcccagctacttgggaggctgaggtaggagaatggcgtgaacccaggaggcagagctttcagtgagccgagattgtgccactgcactacagcctgggtgacagagcaagactccgtctcaaaataaataaataaataaattaaattaaattaaattaaattagccaggcatggtagcttgtgcatgtagtctgagctacttgggaggctgaggtgagaagattgcttgagcctgggatctggaggcgtagtgagctgtgattaccccactgcactccagcctgtgtagctgagaccctgtttcaaaaaaaatgaaatagtgcagctaaaagtatcaatgtcaccaaagcagaagacccaagtctccagccacacttttgttgagacaatagtattcataaagtgattttcaaaatttttatttacttacttatttcccacttcataagctggtctagcatgaagtatggtttttttagttgttgttgttttttttgagacagagtcttgttctgtcacccaggctggattgcagtggcacgatctcagctcactgcaacctccacctctcaggttcaagaaattctcctgcctcagcttcccgagtagctgggattataagcgcacaccaccgtgcccagctaacttttgtatttttaatagagacagggtttctccatgttggcccggctgatctcaaactgacctcaaatgatccacctgccttggcctcccaaagtgtggggattacaggtgtgagctatcacacccaaccaaagtagtattttatttaacatttatatcttcagcaacttaagcatgttcgaaactgaaccataattttgctctcaaatggataaataatcataagaaagctgcttaagaagaaagggtaccttggctgggtgtgatgaatcatgcctgtaatcccagcactttgggaggccaaggcatttggatcacctaaggtcaggagttcgacaccagcctggccaacatggtgaaaccccgtctctaataaaagtacaaaaatattagccaggcatggtggcaggcacttgtggtcctagctactcaggaatctgaggcaggagaattgcttgaacctggggaggcagaggttacagtgagccaagatcgcgccactgcactccagcctgggtgacagagcgagactccatctcaaaaaaaaaaaaaaaaaaagggtaccttgattttttttttttttgagatggtcgcaggttcaagtgattctcgtgcctcagccttctgagtagctgggatcacaggcgtgtgccaccacacccagctaatttttgtattcttagtagagatggggttttgtcatgctggtctctaactcctggcctcaagtgattctcccacttctgcccctccaagtgctggaattacaaacatgagcctctgtgcccagccaaaagtaccttgattttatttatgatattgctaaggaaaggaggcagagaaattctgggcagaagagggtgggtccccaatgagggctccccacctggagctgaaaagcctgatactatggcccaaagtgagcatttacatccctgtttgccctcttgaaaggtgccttttccataactacccatggcccaccccccatcctgtgcccatgaaaaccccaggctcagctgggcacagtagcctgtaaccctagcacttttggaggccagggcgggcagatcacttgaggtcaggagttcaagaccagcctggccaacatggcgaaaccccacctgtactaaaaatacaaaaattagccaggcatggtggcgggcgcctgtaatcccagctactcaggaggctgaggcacgagaatcacttcaacccaggaggcggaggttgcactgagccaagatcgcgccactacactccagcctaggtgatagagcaaaactcagtctaaaaaaaaaaaccaagctcagccagcagagagtggagaagcagctggatattggagactacggttggacggcagaaataagtggcttgacttcagagggacagcttcatggtgtagctttgaagaggagtccagccagggacggctggacttcaggggaagattaccttcttgctccatcctcttttcagctcctcttcccactg

SEQ ID NO: 94198 - DNA, 48335 bp, Homo sapiens
atgcaaggtactgtgtatttcgaattttcctttagtctgcatgagttctcccccaccccccgcaaaggaaaatggagatattttacctattcctgtgataacagtatctcagttttcctttgtggaaccacccacgtctcacgctccattcatgcagttccatgaggctgacctcacccatgggctccaggagtggaagttttttctatctctgggggaagtcctctctccatctgcttccttcttcctacagcttctggcaagatctgtagcttatacttgcattcttacacgtaggagtcatccaataagtatttgttcattatatttcagaatggggggttgagggaagggtggaagactcagattttctctgggattgtgtagttcaaaaacttaaatttgccctcactgctaaaggaaatcgaaggtcaacacgtctgtgttatggcatttgaatcatggagatccaaatgtatctcaaatatattttcttagctataagttatctcctggtcaatttggaaatcattcaactctttgtatgtatggcccatctatatggctcttatatatgtaaaatgaagttatacaggcaatgtacataactcagccagctggtctcctttttatggggattttgctcatttttaatttaataaagaaatcattctttcactgaattttaattcacgatgataagacttcagaaatatagtattatattcagaaagaatttcagtcttcttgctgtcaaacacctcttgctctcacatgggcactttaatgttgtcaggatgtaaattctattttgacagagtccttatagatggaattttcaactttttattcttagctaatatggatgggtaagaggatgtttgagttttctcttctgttttcataaaaacatactttcccacaagactagatgaaaatagtctggttgtgaagcattctaaggtttggagagacaaagttttctctgctcctcaagacctactgttaactatctccaaatggctctgcggttattgttatctctaattgctgtgatgctttggagagtctgaaggcactggaatcgttgtttccaccaagaaatggtttcttctacttacttttggtgcagttccagttgagtttccgatgtaaagagttatggctacagagccattgtcctttgctctttacataatgttagggcctgatgattagaaggatgtaagtttttacctcttttgtccaggaataagagtagactgaactacactcaacacttgtattagctatctattgctatgtaaaaagtgatcccaacatgaagtagcttcataataaacgtgttcaacaataaacatgtattatctcacacattttctgtgtggaatctgggagaggtttagctgggtggttctggctcaggatgtctcatgaagttatgtcaaggtgttggcctggggcagtagtcatctgaaggctttgctggggctgaactggggttttcaaggtggctcattcacatgggtattggctgcaagcctaagtttcttgcttatggagacccctgcttgaaggcatggcagctggcttcctccagaatgagtgatcaaagagagacaccaaggaagaagctgcaatgcctcttatggccttgtctcaaaagcagtcactttgtccatattctactcgctagaagtgagtcactaggtgtagcccatactcagggtgaggggaattgaggcctactttttgagagatggtatatcaaataatttggggacatatttttaaactgccactgttcttttatttccctcctttatgattggctaggtgcaaaacacatacagatgaacaaaccaatcaaggtcaggggtttagtctggagtcagcaaatggacagataagtactgttccctcagtcttggggtaatttacagagaatttcatgcttccaacctaacaaaataggtggtccccaaagctctaaaaagatgaagtggaaattcggtctgagagagccagattttcaaacaatactggcttctgtgcccttgtgaatatgcagtggccaggaggtagctttactcggggagtgctcagagaatgggacaccaggaaggcttctgaacagggatagaactgcttggctgtgctcacttagactaataggtcagaatgcaggcagcagatggtaagacctgagtaagaagctagctagttctgttctgcaggttggcaaaggccagtcacagatggygacagtgaggctacaagtagatcccagttctgggatcaagcaagtgccaaagcctcacactaaaattatctgcagcactgctgagagacgtgcaggatccacaggcagaattctaggcttggatagctaaaacagagaccatagtggttctggcyccttggtggctctaagtgcaaaacatgaggaagggagcacttggtaccagatggagaggttgcgggaacagagcatgactgtcagaccacagagtgaaacatcgcaccataaagacagatggcgagaggggtgcccccctccgtggcagctcactgccttttgagtactcttactgcctgtgtacccttcaaaygggcctctccaaaagcttctacttccaaagcatttttatctagaagtcaaatgtaagtgtttcaagcttgattccaggctgagagcacttcatagcttttctattttctcacatttagagactaccaggtttctgatgcactaattaacaagggaatcatagaatggtgtaatttatgaaattgagcattggagaaaaggatagagtctttccagtacattcttgctattaagatactcgtgcaaaggcagagggtgtgggaaacagaaaatgcacatatttatacttcaaggtatagatcaactctacatgtcattaccctaccaagaaattcagtggctctgctgctaccacctttagatgcagacaggcagggcttccctttaaaggctctgctctggctcttccccagctgtgctcctacatctgaggagtccattaagccaagaaatgtgtccacctggaggtgactgtaccccttcagacctcacatcaggtacccaggagccagtattccctgcccaaatggctctgagccacttccagagcctgcataggcttctcccctagatcctgagatatgcacccctggacctgtggaatagccaagaaatgactgttttggaggggagaaagtgaagacagagcttggacatgtgggctagtgcgttcatggagtggagggtacctggcactgtagggctgaaggggccatgggaagcaaagggtaaaggctgctccatgtggggagcagttctctctgacctgccttgttccagcaaggagctctgagaagtctcagaattctcaattcaaactgggtcttccaagttgttatgaaagtatatttgtcaaggtgaaaggatataatgcttttagtactccatttgttagctttttaactttcacatatttagacatttggtatgtgggtctccatgtgtagccttctcatggtccctacaaatattaaaattggtcccggctccccatttaatatggaatccaagtcaaatcggcttggcctgatttttaaggccttttactatttgatttttctctaatcttacctcccgctactctctgcaggaatcttctatctgtcaaacctgtcgacctacagcccaggctcagcccacatccttttctctgtgctcaggttcacattatttttctcctctgaaaggcctccgtttctgccttggatttatatggccaacgtagtgtttcattatgacccagctcaagcctcacagccatgtctcctcctctggactcttctaacagcttttgtctcagccacttattggcactcaaagtgtgcaactgtgtgtggccatttttcatattatgcacaaggkgtggctataagataaggagacataaatatgcaagttttcaaaccaggacaagggacagggaaaaaaaaaaaaaaaagaagagttgccaaagaatcaggagaatgtagttaggcagctactaagggaagagatgtcagcattgtcaataagctgagagaggtcatgagaaagataccccaaaatagaccattattctagaaggtaagaggtcttttgtaaccattgaaagaatagcagattgtgtgagcaaaagcaacgctgtagtgggaaaaataagagatgagaaagtggagacarcaagtatacttttatttatttatttagagacagggcctcaatctgtggcccaggctggagtgcagtggcttggtcacagtacactgcagcctcaacctcccacactcaagcgatcatcccatctcagcaccccgcctcccccaccgcgaatagctgggactataggtgtgtgccaccacacccggctagttttttattttttgcatataggggagccttattatgttcccagactggtttcaaactcctggcctcaagcaatcctcccaccttggcatcccaaggtgctgggattacaggcatgagccacagtgctcagcagcaaatataatgtttcycaagaagtgtgattcctaggagaaaggagaaggtagtttgggtggaagagattgggtggctttgttctgttcaaaggatgggcgagactatgtttgtgggagaaagatttaggttagaggaagaaattaataatggggaaagaaagaatagctgaataaaatctgggaatggctgggatccagggcacaggtgcaagatttaaccttgaggagaaagggcacttcttgctgtgggtgagggagtgaagagggtaagatgaatgaaggtacaggataggcataataatgaagagcctggatttaagggtgaagccactggctcacattatagaggaaaggctaggaaagccgaattttctggggccaggtccagatttaatatatttaagtataacagtcttaattcattcctttcaccttattcagtgccctgggtgtgccaaatactactgggcactggggtctacaaaggtacgacttttcatgtaatgttggaatttgttatgttggtaactcgagatttgcatatatttaacagtcttaattcattcctttcacattattcagtgccctgggtgtgccaaatactactgggcactggggtctataaaggtacgacttttcattaattttggaatttgttatgttggtaactcgagatttgcttttcattcttctggaaggctgtatgtagaaataaatacagtcatcagacgagttctttgtcagaccagatgtcctgggttggggtttggaaaacatgggcatcttaacaatggtgccctgtttgaggtggagagggaggagaggcccaaatcggggaaaggaattaaatggaggtttagacgcgggtaaccggagtgggtgggccttcaacctggaagatgggaatccccagcgcacttcgggcagcgctgtaaccaagggtaaccgcacctcggtttacaccggtgtgaagaccagcctcttccccaaaccaggtgtatctacggcggcctagcaggaccacacacaagccaagcacgtcacgtcattcgagctaccttaccgcgaaagtccactgcctcctactacttctggtcactactacctttgctcacagtttattaaggaggagcggagaagaagaggggcggagaaggggcggggagaatcacctttccttttttacaattggtcgtagtagactccgagtcctgccgcccgtcctgcagccgacaggctgccaggactgtcactcgaggagctgccgctaccgccccccgccgtggccccgccccttgccgtggctgggatctcgcgggaagagctgcgggcacggcggtggctcggtctcccggctgcgcgcggagcgggagggctctcctcacacaagckcttccttgccgagaggctggagctgcggcaccgcaggcctgagccaccccttctctgctgtctccttctcttcctcagggctcccgtgtctgctcgccctccgacgctgctcaggttagaaagcccggagcgcgtctccgctgaggagcggtcggggagcggggacacggagcagccggagcaggcgggctcctgacgggggcggctctgggggctgcgcggcgctgcctggtgggcgcgaggcttggcggggtttgggagtccggggggcgaggaggcggtgcagtgggatccgggcgcgggcgcccaagggcggtgtagcgggtgccggagctcccgaggtgagggggcaatgtattagggatcctgggggctcttccggcttggggtaggggtgggtggcggcacacggggtcctaggtctttgacgtcgagggagatttatcagggtcttgagcttcttggaggtggtgtagcggggttccgggacaaggggtctttttacccgggtcccgagctctttggggcagagaatgcagtttagcaaggtttacaccggtgtaaaccttgtctctggaggcagatcatcggggtcttgggggttctttgagcgggcgtgggcgtccgtttcgcattgctgggatgaagaagcagtgtgtccgggttctggggagaggggtctgttcatcggtgtctccgggtgagagagcgatgtatccgttccgctggggccggggccgccttggggggttgttgggggctgagggtgtgtagcggcgaccagcgtctggccggggtttctgctttgcccggagcggggcggtaacttggcatggtctccagtcttttgggggcgacggggcgagttagctggcccccgggcagtctctcggggtgggcgcggctccgcaggcgctgggtccgctgagggcgggagagggctttggtgctaccgcgcaggctgggcagcatcctgaaacgtttttgttcaggtctccttctctctggatgagatttactcaatgcttagttggaggattgatcggtgttgttgcctagttgaagaagcagtgcgtttgttctgcagttttcttttctctgccccgggatccctgtgggggcgcgctggtctcgctggagctccgggagctagagtggcagcaccttaggtgggcgtttggtctgcaggttctttaggaggccggtgtccgcaggttgagcgtggatacagctcctgagcaactggaatctgttgagggtggggaagackgattttggyttgctttcctaggtggtggtctgctttgctcatcctgcatgattagatctgttctgaagtcttgcctgagtgaatgttaggcagagtcggatagtgcagggaagcgtgttctgtctggcttctttctgtcctttgaaaagcatttgtagagagggataacgtcaaattcagcctccagaaaacaatggaatttgaaatcccaaagctagaactctgcaaaaacgttttctgtgacctgtaaggatggttaatcgagcttttttagagaattctgcttaacagtttcattgtattgtaaaagtgtatttagccttggatattacagaggttttggtaactagcgtaggcgtaggtgggatttaaataaaatgacttgtatgtatgtgtattggttaaaaaaaaaaacagcgtataggtgagaaagcctatgtgtttgcctgacatttcttttggttagttactctatcacagaggcctgtatatgaaagttaatgtggcaggcagtgaagtccgtactcagagctgttctgtaaatatgtaatctggggttaacagacaaatttgagtataccaaagcaaataattttgcctgccttagtctttttcttcgtgtcagttttttttttttcttgttttttggtttgtttcttttgaaacagggacttattccgccttccaggctaggttgtagcatcgctaccatggctcactgcagcctcgacctccaaagctcaagcagccctcccagttcagcttcccatccccacccccagtagaggagctggaactacatgcatgtgccaccacgcctcactaattttatttatttatttattcaattaattaaagacaaggtcttgcgctgttgcccagtctggtcttgaactcctggcctcaagtgatccttcagcctcagcttcccaaagtactgggatttagaggcgtgagtcaccatgccaggcctcttagatacaattttttttaaaagatgtcattttttctgatcttagaaccagacagattagggataatgtacttaattttggaattttacatcattttgaaaaacaaaggaatcccgcacagcaatatttaagactttgaagggtttaaaataagttttgttgttgttgttattcagaccaaaatacctggttgacatttacagctatcacaactgattgcttgagcagatatttggttggaatgacagcccccaaacctgtaagcagatcttatttttcctttttttgagagaaagacaaagaacaaattaagcaggtttcagaaacttttttttttctaaaaagcagctttcatcatttctaagtaaggcatagactgataagtcaacacatatttgattatctgctaggtgtcacagcgctggatgtacactgattaaagctgtcatgtgactttcccctttaagtccagagagaggaagaaaacaaataaatacagttaaaaattgtgatactgctaaggaagaaatacacaaggtacttaagattcagctctctttttttagtaacccctgaatgatgatacgattgatgtgtgttgtgataataagaaaccaagcaaaatagttaactgccttctgaattagtaaagaaagattaaattacaatcagtagagttttaggtgttaaatgtatgttgactctttgtagatgattgtgctacgtaagcatacaaaagcctataaggatacacatcagacttaaccatgtttggattcttcaggagggagttgcagaggcatagaagagagcggtttaattttatagttttatattacttgaatctatttcaatgagcagacattacttttaagtacaagttagagaaaccctaaaattaaaacatttcagtcactatgcaaatggtgaaatgtacagtatttataaggcttttgtcagtattgccagttgtacccgtgtatactaatgaaggaaaagggtatttcaagtatctgaaaattataagggtgtgcagggtggggtgggtagcacaacaaaataagaaaagacacagacctaagtaaaatgttaaaacatgttaagtttgttggatatttaattatgtaaagataaattaattttaggactttcttttatcaaatttaattgtttcctgagtttgcaaaaggaagtttttagatttcctagaggagaatagggtgggggaataggtattcttattgtggtacagacttcaggaaatttctttttgtcaaacatatacacatctgatagatatattttgcttgtgaagcatacgaaccatacaaataattttatagtttcattattacactgctgaaaatgacagtaccaaagtgtcttttgaattatcattcagagttctagaatcataaatatgatatactaaagcagtttctagaaaggaaatcataagacatgaattccagtcttcactgtgctactcatggtgtgtccttggataattccttaatctttcagggccccagttttcatatatacatatatgaattatacttacatacattttatatataatatatacttttgctttaatatatacatatatgacatgtgtatgttgttatatacatatgccatatatgtatataatatgtataatatataaaatatgtgtataaaaagatacatatacacacacttagagtttttgtgttgcaagtctgaagtattgtatgtacaaaaaggaagagataccttaagagtagctagttctcaagaaacaactagttccatgtaatttttacatattatacctaattttagaagcctcttctttttaaaggtacatggcaagtatttaattccagaatatagattcatgaaggtgagtgattttctttagataatttagctttatctgttaaagcattattatttttagttccaatccctggttctgtagtagattatctatataataatatgtccttacttaactctggatatagaatgaggtctctagtggttgcctccagacttgatcccctttaatccatccttacattactgccaaggtgatttttctgaagtgcaaatctattcattgcttcttttcttgtttcttttctcttttctttctctttctttcttagaaatgttactgagatttatttatttatctttcaacttttcttttaagttcaggggcacatgtgcagaatgggcaggtttgtgacacaggtaaacatgtgccatagtgatttactgcacagatcatcccatcacccaggtataaagcccagcatccactagctattcttctcttcctgatgctgtctctccctgcccttctttcttaaagcccatactttatcagcccaactctctatcgttacaaggcctttcatcatctgactaatcttatgcatttcccccaccataaatctaaagctgcacttgtactaatacgagcagtttactgaatgagccatactgtttcctgactcagagccttcacatatgttctctccactatttaggatgtctttccttctcttgtcttgctggcaaagtctactgattttttaagatacaacgtaagcactgtctgctttttttttttttttttttttagctcttttttagttaccattttttcttttttttctttctttactgtctgctttttaagtcttctggtcttccctcttcccaaccctaggkgttatatactcactgtatcatgttcattcattctcttgkgtttactaatgtgttgtaattaagtctctctttcctcctggactcaaaggcaggtttatatttgtcttattactttttgacttcctgttgcttgtttatgcatagttggctatcattacatgtttgaactctcagtaccaagattgatgtgttcatgatgtcagaagtgagttaaactcaaatctcagtcttatcctgttttcctaaaatttgggagtttctaaagtatcttattctcttgccctgtgaccataagctgatatgagaatggtagttcttagctttgtgtttaagaaataagacttctcgcactttaagaggtgatggttacactgttaaacttgcagaaaagtcttgtagaattttgaggcaactactaatccttatctctaaaattgctagaagagatattaactagtttgggtgttttaaatcttggacatcattatttggtagatattttaccttggctgctttttacttggaaaatgatagtagctgatgtatgcaggtttttatataggctttaataattgctttacatacattgccattcattttcaaaataaatcctaaacatttaataatttgctcagcgtcattatctactaagatgcagactatgactacatgtaggtctgactgtctccagactctatgctttttctaatactacactgttttctgaatatgactgcttattcagtgtttaaaattattaacatatttaattcattttgtaaattgaagaagtaggttgtaaagtttatccattcagttcttccaaaaaagctaaagtagacaatttgagattgattggactttagagaccatttaatccaactccttcctttagcatatgaggaagcacacatgcaagagtggtggaatggggtgctgaagatcacacagttagttggtctataagattttctttgttaagctggttgtgaacactggtgttataaaactattactcgaggccaggcgcggtggcttacgcctctaatcccagmactttgggaggccgaggcgggcggattacctgaagtcaggagttcaagaccagcctggctaacatggtgaaaccccgtctctactaaaaatacaaaaattagccgggcgtggtggcacacgcctgtaatcccagctattcgggaggctgaggcaggaaaattgcttgagcctgggagacggaggttgcagtgagccgagattgtccagcctggccgacagacctagactctgtctcaaaaaaaaaaaaaaaaaaaaaaaaaggccgggtgcgatggctcacacttgtgatcccagcactttgggaggctgargcaggtggatcacttgagttcaggagttcgagaccagcctggccaacatggtgaaaccccgtctctactaaaaatacaaaaattagccaggtgtggtggtgcacacctgtaatcccaggtactcgggaggctgaggcaggagaattgcttgaacccgggacgcagaggttgcaatgagctgagatcgcgccactgcactcaggctgggtgacagagcaagactcatctcaaaaacaaaaaacaaaacaaaacaaaacaaacaaaaactattgcttgaaagggataccagatgcttgattttccccctcaaggggaagaagcaaaagcctagaatgactttttataaaagtaatgttgaggatctgagagtcttaaggacaatcagagaaaatcctgactttggatcatgacacatggagacacgccagtgcctgaagcacatggttccctaatcttggctcctttccttcctctttttctttcttaaaatttgtccacagtttactgatcttatgcctgctgagttgttattagcatcagtcttaccagttatcatttaagtgccaaccatgggccaactaataggaatacagaaatgcataaaatctagtcactgccatgaagaagcttggtctgtttgggagcggaaggcagtttatatctaattgcaaggtagtgtataaagataaccatgagtagtataactttagcagctcagaagattaggtaaatgtgggctgggctagtggttacagaaatttctatatagaaaagtttctacttaagtctttaaatgaagagttggaatggtgtagaaagagaaaaagacttgggaaaagttttttttttttttttttaaatctcagcttttactaatcttaccttgcttactttccttcagccacactcctcactgtttcatgaggtctttaacatgttctttcagatatccaaatgtctccctccttcacttccttcaggtcttaattaaagtattatcctttatctgagaactttactggtcaccttgtttaaaatgacaatatctcttccacacatactcttcctatccttcttgcctgctttgtttcttttttgtgcttttcactatccaacatactctagatttttattgtctttctactcctactaaaaaaaagtgtaagagccggacacggtgatgcatgcctgtagtcccacctacctcggaggccgaggttggaggattgcttgagcctaggagtttgagatcagcctgggcaaaaaagtaagaccctgtctcaaaaaaaagagttaaattaaatgaaaaattaaaaaacataagaccctccaggatagggatttttacccattttagtcaatattgtatccccaacatacagaacggtgcattttacaaagtaggtgctcaaatttttgttgaattaataagacagtggaactttaaagcaggagcttaaaagatcatttgatctaagcctctcatctcttcttttctttctttcttgctggcaggcatggaggaagaggaactttccattccatctattccttttttttttttttgagacggagtttcgcttctgttgcgtaggctggagtgcaatggcctgatctggctcaccgcaacctctgcctcccaggttcaagtgattctcctgcctcagcctcctgagtagctgggattacatgcatgtgccaccactcccggctaattttgtatttttagtagagatgggatttctccatgttggtcaggctggtctcaaactcccgacctcaggtgatccgcctrcctcggcctcccaaagtgcttggattacaggcgtgagccactgcccctggcccatccattctgttttttaaaaaatttgataggactcgaagaaaaaatatatacaataaagtacacaaatcataagtatacagctcaatgaattacatatgtaaacatgtaaccaacaatcagatcaagatagagaacatttccaggaccttgaaagcttccctcctgtactctcttagtcattgcttaacgaaagttaccacttttctgatacccatcactatagattagttgtgtttattcctgaaattcatataagtggaatcaaatcattcttttatgtctmatttcctgtgttgaacattacatctgtgaaatccatgttttttgagttagtagtagtaattctttttcattgctctgtattatttcattatacgagtgtctatttgcgtcttctgttgacagacatttgggctgtttccagtgtttagttcttagaaacaaagctaccataaacaattttgtgcatgtgttttggtggccataaaaattcattttttggcaaagcgcttcatttaaatatataataaaacatatctccatatatatacacacatatacacacataattcttttttttaattatactttaagttctggggtacatatgcacaacgtgcaggtttgttacatatgtatacatgtgccatgttggtgtgctgcacctgcaactcgtcatttacattaggtatatctcctaatgctgtccctccccccaccccacaacaggcccttgtgtgtgatgttccccttcctgtgtccaagtgttctcattgttcaattctcacctatgaatgataacatgtggtgtttggttttttgtccctgcgatagtttgctgataatgatggtttccagcttcatccatgtccctacaaaggacatgaactcatccttttttattgctgcatagtgttccatggtgtgtatgtgccacattttcttaatccaccctatcattgatggacatttgggttggttccaagtctttgctattgtgaatagtgccgcaataaacatacgaacacacataattcttaagctcacatggttcctctcacatgctagatgatcattaaatgattaaagatgaattaactaatctcttattataagattatttcaaatgtattaaaataatttattctctctgctaataacatttatgtaaatcttagtacataatctttctccctacctgatttgtttaaagaataggaataaaaacattaagtcaaaagataagaccttaaaaaaattagacattgccatattgctttctagaaagatgctaatttatatgccaatatgaaacattagttttaaaaaaacatttgcaatttgataagcaaaatatcttacttaatttgtatttctttggttataagtgaagttgaaacattgtaaattgtttcataaacaattagatattaaaatatttataataaaacaatttttaaaagaatgcctcagatgtcttgtaaggtaaaatatattttawctagaattattgttctttattgttgtttctccttttaatagataaattttgaatagttattagaaaaacataacaaaattcagagatagaaacagttgtcccagaggcagccattgttaacagttttttatgtatacttctaaagatattatagactatgcatatatatgtatatgtgtataaatgtgtgtatatgtatatgtttgtaagtgtatgtatatatatttgtgtgtgcatgcatgtgtgtaatgtgtgtgtatatatgccaaaacattagatgaattatggaaaccattcattaaaatactttctggtttagatgtgttattgtgtaccattttgtgtattaaaaattagaaagggtctagctatgattcgtatctggctactggcccagaaggaagaaaagcagggtctggcagtatttggcggtaattttctgtaagacaagtggccttagcgctccttattattgaatcagttctttgacaatagcacttctgtttatagtactgattctgtagtactgttccaaagtgaaaagccaagtttttgaaaattagacagatgatacctgaaagaagctctttaaatgtatgaaagctatttggaggtatttaggaaaacatttaggggaaagatactttattcttaagcattttaggattcatttgcttgacagttacagtttttgcagaattcctctgactactgtttaacagtgaaaatttgagtttgaataattgcaaataaaattattcatttacttaaacttttatttacctaatttaaaaaccaaataaaattattcatttacttaaacttttatttacctaatttaaaaaccaatcaccctcaatataaacatattttaaaaatattttaagacagtttttcatgataatatatagtagtaatttgtctcatatataaaagatatttctgagcttgacttgaatgtcactgttaaataaatggtttgagcaacaagagtcagaaattttaattggtttctgcaggattttaatggtttagggaaaagatatttacttttgggatatattctttttttttttttttgagatggagtctcgcactgtcgcccgggctggagtgcaatggcatgatcttggctcactgcaacctcggcctcccaggttcaagcaattctcttgccttagcctcctgagtagctgggattacaggcgcctgccaccatgcccggccaattttttgtatttttagtagagacggggtttcattatgttggccaggctggtctcgaactcctgaccttgtgatccacccaccttgacctcccaaagtgctgggattacaggcgtgagccaccgcgccctgctctgggatagattctttttaaggcccttatttcaaaaactaaaatttgggaatgactattgtttactgaatactaactcactgacgtagcccaggataagttaggggtattataagagttcctgtttactggaattcttgtctcctactgaggatagattataaagctctaagggccgctgaaagaatttacatctaattgtgattggtaatatttggggaatttgaagaaagaatttgtcagagggaagagatcatcttgattttttaaaaatgttcaattttgaaatatatctttataggagaattgcaaagatagtccagaagatttccatgtgccatatacccttcactcagctttctctaatgttcacatcttatataatcatgttatattgatcaaaactaagaaattcatactgattttttaaaagggaattcaattaaccattttttttgaagacctattatgtataaaagagtattttggctgctgaagtatgtacaatatgggaaaacaagtaaaggttacagacaataatagactgatatcagagcttggtgtcattccttgaacaaattcttaaacagattatcgaacacacgtgttgtcggtacttaacaaaagaaggcactgatcactaggagccagcatgggttcacaaagaacaagtaatgacacctagcttcacttctttttttatggggtaagtgaactattaatagtagatatatcagaagatactctggccatagtatatatagaattattgctacatttattggattttaaattacgtgctgggcactggattaaatgcttttacataggttgtctcattaagttattgttttacagatgaggaaagggtccctcaaggttatacatatagcatttgacatcctcttaacgatatctttttagactagatagaaaatgtggtccgaatagttacataggtaggtggattagtaattgcttaaatggccatatccagagcttgatgattaaaattaaactgcagtacattcttagtggtgtgcctcaagaagctatcatgtcctatttaagatttttatcagttactctgaaaattgtaagggaatgctggtatatatacagaatcagcatcttcactcttactgccttatttctaatagttaaaaatgacagactgtatttagaaaatatttgttacgaaatatgttataagattttatatttggtgtgtaaatatttgataaagaccggcctatagttgatttttttttcagaagtctgcacaaatacaagatgggaatcttggagggctaacagcagtagatgtgtgtttgtttaagcagaggtgtgtgcctgggtgtgtctccttatttgtctgcagttggtgagtcagtggtttattataactatcccaatattcagcacctgcttaagctacactttgaagcatattgtccaaaacagttgattattcttttctactctgcatctagcttagttctgttctgtttgccacattttaaggtaggcattgataaacagtgtagtgagaagagagtaatcagaatgaagcatgtcttgaaacagttgcaaagtaattgaaacattgaggttgtttagcatggaagaaagaagagttggggtatatgataatactttttagattgggtaactggatgatctttaatgttcttcctgactcaaatctgagattctgtgaaacatgaagggttggcacatggaagaaggattaagcatatcttttgcattgcagtctggaggatggaactaggaacaatgaatgaaagttagaggaaggaaaatattggttcataatgaagaagcctttttatttttttaagagatggggtcttgctctgttgcccaggctggtgacaatttgaatggagtaaacattcactccctgaggcactaaagcatagattgagtagggtttaatcaagcgatcctttaaggacttttccaatttaaaaatttttwaaaattttcttcattggttgtaattccaattggcaaaacattttcttgggcacttattcacacttayaatacttatggcttcatayagtatcagattctattagagagaatgataccttcctgataatcaaaatctgaaattatagtatgaaataatttaactagattttttatttttttgagacagrgtcttactctgtcatccaggctggtgtgcagtggtgtgatcttggctcactgcaacctctgcttcctgggctaaagtgatcctccagtctcagcctcccaggtagctgggactacaggcgcatgccaccacacccagctaatttttgtatttttgtagagatggggctttgccatgttgcccaggctggtcttcaattcctgagctcaaagtgatccacctgccttggcctcccaaagtgatgggattataggcatgagccaccatacctggccttagatgatttttaaaaagtttattcacaattccgaaggaaacaagattttagtcttgttttagaaatgtcacagactaattgaagttgcttttaaagatgatggcataagtatcattaaattcaaatgcttgtggtttctcttctgtgtatctaaaaaaatgttaatgtcaaaaactgaaaccactcatgcctgtaatcccagcactttgggaggcaaaggtgggcagatcacctgaggtcaggagtttgagacctggcctacatggtgaaaccccgtcactactaaaaatacaaaaattagctgggcatggtggtgggcacctgtaatcccagctactcaggaggctgaagcagcagaatcacttgagcctgggaggtagaggttgcattgcgctgagatcgcaccagtgtattccagcctgggcgacaagagtgaaactatgtctaaaaaacaaaacaaaacaaaacaaaacaaacaaacaaacaaaaccccaaagattattaacttctaaatgattcagttgtttaaatctaaaatggaacagtaaaccattttattcactgtcatcccttacacaaatcagagctttttttggccttcatgaccttcatatttttttatcctgagaatactctctttctttaagcccatctaaagtctaatttttaggacttaaccctgatccatttttttaaagtcatctcgggttcttctatccaacactgatatttttctttcttttctaacagtttggtaatctattagtactatatcctatactgttactaattgctttataatrtgtaaggttttttaaaaaaattaacaggattataagccccttgaagactcttttactgaggcttgaaaactacttaatgaaattaaaatttacagactcggtggttgaattttagctaatgttgaaactcttaatagcatgagaaaaagcctatgcagaatttccatgtttagtttctactttttttctttagcaatatgatctttagtcttcatctgatgtattgtaaaatttacaaataatagtaatatacccactttaaaaatgaaaaataagaaaaagatttttccatcatcctcacattcttaataccaccatctcctaaattttggagtctcccttttgttgtttttcaatgcatatgccaatgtctttgtcattagccctcagaagtggcaaataattttaaaatgtgtatttcaaaacgaaatttctttttagaaaatcaggagatacattctagtaaatgtacttactggacctcagtagtgtactttttactttgttacattcatatgaacaccaaaaagtttaatgaataaaatagaatatattttaacatgtttaagaagtatgtctgtgacaacatctaattgagctgttgatgaagttagtttatagtcatcagcttcattttctatattcttcattcccygtacaaaatacttgtcatacccagtgggtgttccagacttagcatgttttaaaatcaaggtagcattgtcatattttgttttgattggcttttgctcaggggaagtttgggtccatatcagagatctgtttgccttcttcactgaagctaatgactttctgttatgtgataggctttcactgcttcttcatgtgggggcatctctgcaatgtaaattgctattttccagttattttacttaaattaaaacaaataaagtttytgaagacactcaggaaatgtgtgaatttactgagtatataaccttagaacccttgagcaggaaaacatcaaatcacaaatagggaggtgagtatactggctggcaaatcttacattgtactttgtcatgtaacactgttcacttactcatttttagaagctacatgtgcattatatactaatggtatatctctcaaataattgaaataatgaaaaattgataattcagagccactttttatttggcatgggatgtgattgtttttgcattaccacatattaaagtctaaaaggagttaaattttgtgatctagtagttttcagtggaaccttgttttttttttttttttttttttttgagacagggtcttgttctgttgcccaggctggagtgcagtggtgtgatttcgggctcactgcaacctccacctcctgggttcaagcgcttctcctgcctcagcctcccaagtagctgggactgcaggtgggcaataccacacctggctaatttttgtatttttagtagagacagggtttcaccatgttggccaggctggtctcaaactcctgacctcagatgatctgcccacctcagccacccaaagtactgggattacaggcatgcgtcagccaccacccctggcccatttttgttttttttcctcaaacatctatatggcactgcaatatagaatacaaataaaaagtaacatttttgtataactttaagtacatatttataacattaacttagcataaaggggatcagtgacattcagggtaggctcttaagttgtcttatcttcacgacattctattgccactttattcctagcatttaacagtgcctcatacatagcagattccaaatgtatcttagtgaaataaatgaatgaatgacttaggccattttgatgtactcaagaatttgaaattgaataactgataatgattgtagtttctcaatctctgcattaaatttctattttgttttgattgtacaatgtccaccacaactggaagagttgttttagttggttcttgagacttagagtagaatsaggacactctcaaattgaactatgactttgaaaaaagaagtggataatgtttcaaacctgaatcaggaacatttcatatttgctttttttttttttttgagacagtctctttgtcacctaggctggagtgcaatggtgcaatctcggctctctgcaacctttgcctcctgggttcaagcgattcttgtgcctcagccttccgagtagctgggattataggcatgcgccaccacacccagctaatttttgtattttagtagagacggggtttcaccacgcccagctaatttttgtatttttagtagagacagagttttgccatgttaccaggctggtctcaaactcctgacttcaggtgatccatctgccttggtctcccaaagtgctgagattactggtgtgagccactgcacccggccttgcttgtgttctttatgatgaatataaaagaagttaaacaggagatatcaccattttttgataatttttaaaacaatagtacaatatgttatgagtcccttagtataacagcttcactgaagtataactggcatatagtgaattacacaatttagtaagttttgatgtaggtatatacctgtgaaatcattaccacattcaaaatagtgaccatacccatcatctccagaagtttcttcatgcatgcccctttattatctttacttcatgcccctttattatctttacctcatgcccctttattatctttacttcatgcccctttatcatctttacttcatgccgctttatcatctttacttcatgccgctttatcatctttacttcatgcccctccacactccaccctctcaaagtaaccattgatctacttaatgtaactacagattgattgttttgtattttctagagttttatataaatggaattacatagtatgtacttttctttatagtctggcttctttcactcaaataattattttgagattcttctctgttkttgcatgtataaataattcattcattttttgtagtaatatcccattatatgggtataccaaaatttatcattcatttgctgatgagcatttgggttatttacagttttatttacaaataaagctgttacgaatattagtgtacgagtctttatatggacatatattttcatttcttttggttaaataggatgactaggtcacagggtaggtatctgttttaccttttttgggaataacatatttatcataaagggctaattttcttaatacacaaagagatcttgtagctcggtaagagtaagatcaaaaatccaacagaaaaatgggcagaggacaaaaccaggtagctaatatcaaaaaatatacaaatggctttaagcataagaaaatatttttggaaagctgaacaaaaaacttaatatgttgtttaaaatttaaacctctagagtcagtctgcttgggtttgcatattctctaacaatcagtgtaatcaagttccctaaccttcctgtgtttcagttttctcatcagtaaaatgtggctaataatagcaatatcatctacctcaagggactgttatgagtattagataagttaatatatgtggagttctcagaacaatatctgacacacagtaagtgctctatggaagtttatttttattattattcaaatgcaaatttaaacaggagaacattttttgattatcagattgacaaggattaaaaagctcaataatacacaacactggcaaagatatctagaatcactgttatatactgtaggcaggaacacaaattgtgcaatttctttggaggacaagttgactttacatgttaaaatgataaatattcatactttttcattcaattttaaataatttatctttgctctttatagtattaattatattgtcaaaaaacatatatgactcttagtaggggtctggttaaataaatgatgatatagccacacaatgggatgtcatatagtcataaaaaaagaaaaaaggagcacttctccataagctaatctctaagacacattattgggttaaaaaaaagtaagttgcagagcagtgtttatggtatgccgcttatattgctgtaaataagttgtgtatgtgttggtgtaaatacacatgcatatgcacacattaataaacatattttgcttcaaaatgcatagacttttctagaaggatacacaagaaagggaatagttccttctgaagagggactaaaagaagggaccaggagattggaaatcagatctcggtatgactgtggttgggtttggttgtgtacacttttatactgcttgagtatttatttcttgtcaagagaatattacattaaaagaatttgtagtatgtaattatagattcacaggaagttggaaaattcgtgcagagaggtaccatatacccttcatccaatttcaaaccctgctggtaacatcttatataaccctagtgcactatcaaaaccatgaaattgatgttggacaatccaaagactttattcagatttcaccagttttacaggcactcattgtatgtgtgtaattgtttgcagttttatcatgtgtagttttgaccaccacagtcaagatacagaactgtttcatcacaacagaaatccctgtgccatccctatatagtcatatctctcatcctaaccactgacaacgtaactcctggccttaaagagcatatagttttataggggagataatagagatataycaacaattcagtacaaagaacaacacaagtggctgtgtgcagtggctcatgcctgcaatcccagcacttcaggaagccaaggcgggtggatcacttgagaggtcaggagttcaagaccagcctggctaacatggcgaaaccctgtctctactaaaaatacaaaaattagctgggcgtggtggtgcatgcctgtagtcccagctactcaggaggctgaggcacaagaattgcttgagcctgggaagtggaggttgcagtgagctgtgaatgcgccactgcactccagcctggacgacagagtgagactctgtctcaaaaaccaataccataacaagtgccaaaagaacgtatttattgctttgagagttatgagtgatcaaatattaaaaaaggatcagaaaaatcttcatggaaataattagtatagttataaggagaactggctatagttctgattctgcattaaacaccactaactaaccagatgtataaaataagaaagttgagagaaagatttttttagtggtcccttttagtatagtcttaatactgtggataatttggcatcatccttgaaggagggctatgattttattcatttatcaaatrtttgaccattttatgccaggcactgctctaggctctgtaagtacctcagtgaacaaaacagacaaaaatccctacccctaccctgagaagacatacattttagatgagtgaattaaaaaaaatgtaagtttacagcatgttagaagataagtagtaaagaggaaaaataaaccagggaagggggaataaagtatgggaggagttacacttctctaaaggatggccaggaaaattcactgataaggtgacttttaaataacatgaagacagtcagtgaaggagatatgacacaaatacaaatcattctaggcccagggaatagcaaatgccaagtctctgaggttggagcatgcctgcggtatttacatttgaagaagcttgtcattggagttgagtaaaggactgggtaatataggatgaagtcagaaaggtaatgatggcactggtgatgggctggttgtgctgccaggtcaagcaaggtcttatagaccattttaaggacttcagcttttagactaagtgatacgtggtatagaaagacattggatgagttggaacagaatagtgacatgattggacttttaaagagtcagtctggcaactgttgagagtaggctaaaggagaacaagggcagaagcagtgaaaccacctaggagactgttgcagtaattcaggtgagaggtgatggcttggaccaaaatggtagtagtggtggtggtgagtaattgacattttgaggtcaacaggatttgggggactgggaagcagggagagaaaaaagagggaggcacagaggttaagggtgatacaaagtttgtggtctgagcacctagaaggctagttacccatttgctgttatgggtaaaactatgatggaagattttggaggagagaagttggatcttggacaaagtaaatttaagatatatcttaggtattctaagtgagatgactgctaactatctgagtctagagttcaaaggaaaggaatgggctagaggtttaagtttgggaattatgtatagatgctatttaaagaaatcagatcagatgacttcactaagggagtaagcataaagaggcgaaggtccaggacagagatttggagcactacaacatttaaagtttgggaaatgaagaactagcaaaggaaacttagaaggagaaatcactgaggcaagaggaaaaccaggagaacatggaatcttggaagccaatgaagaaagtgttttgagaggagggagtaatgaaccccttgtcagatgctgctcatagttccagtaaagagaactggtaattgaattggtcattctagtttgcaatgtggaattcattagtgattctgacaagagcaggtttgatagagtggtggggaaatagactcattggaatggattcaagagaaagggaagtgagaaattggagacatgcagaaagaatcatttttctgaggaattttgctgaagagggagggagagaaatagaatagtaacttaagagagatgttcaaagagtttttttgttttttgtttttgttttgacgtgtttgtaggaggctgagaaaaaaatggaaaatttgatgggatagacgaagaggtagtggtggttaatggggatctagtgtgtaagtaaaaaggttgggtcttgggtagagcagaaatagttcacgctagtaatgaaagaggaatcagaatatgtgggcacagacgtagttaggtagatgtggtttgagagtttgtagaagttcttttattgcttctagtattttattagtaaaataggacacagggtcataagataaaagtgaggatgagagggaaggtgatggaagattgaggagcaaaaagttgaaatagttatgtaagagagtggcagaatggatgaatcaggaaaataaggtataattgtcagtcagcattaaggaaactcatttgaggctcctggccacgaatttaaagagaaaccaatttatcagacatcgtgtatttgtgtgtgtgtgtgtgtgtgtgtgtgtgtgwgagagagagagagagagagtgcatgtccatccagccacatgcagctgtgtaggtatcaacacagaataggcagaaaattgcgctgaaagagagagagagagagagagagtccatccagccacatgcagctctgtaggtatcaacatagaataggcagaaaattgcattggtaacaactagccaagcaagattgacatagtcagaaggaagacaagtagttaagcatgtatgcaaaggaaggaaggaagtaaatgattgaatatggatttaatttgggtaagaaggggattgaggacatgggaaggtaaaaggaagtgcagaagtcatcagattagtggactacaggtctgttgggttggcagattttttggagttaggatattagaggtagtgagctggtatcagagtgtgatacttaaaaatggtatttcgaggctgggcatcatgcctcatgtgtgtaatcctagcacttcgggaggctgaggcaggtggatcacttgaggtcaggagattgagaccagcctggccaacatggtgaaaccccgtctctacaaaaaaatacaaaaattagtcgggygtggtggtgcgtgcctgtagtcccagctactcaggaggctgaggtgggaggatcacttgagtccagtgagctgtgattgcaccactgcactccagcctgggcgacagggtgagaccctgtctcagaacaaaacaaaacaaaaaatggcattttggaagggttgcatttattaaaattgagaaggtttaaggtttgactgtatgggaatgagtataaaatagggttgagggaaggatcagtggaagatcctagatctactgaagggcagaacttcctttctgataataagaaactgacaagcaagaattgggaaaggattgtgtggatgatgagattcccaagcattatgaaaataatgatggtgtaatgagcaagcagctaaaatcttcaagaaataaagtggagagcttgataactgcagtaaagaacggctacagtctgatgatgagatttcagtttggatgtttttagggaagagttaggaagaattgtctggaatgggcaactaggattgagaaagaatagaagcttttagtctgaggaactgagccaccattatcaggcctagagaggcactgaaatgaaataattacctctggaagccacatgctgtgtgggctctagactgataccaggtagccataaaatgccatgtgctagacgccataactcataccctatagttcgacaatatatagtcaatcactaatcaatgctatttctgtaaaccaatgagaattcctgtcaaacaattgtgtatcagtctgctccatgtccccctttgcctttaaaaacctgctggtaacaaaggctgaatggggcactccccaaggcaacttggaaatgtgtcctaggctgcaggtctcaaccttggctcaaataaattctctatattaattttacttcagtttcttcctttaggtcagtaggatcaagaagacctaccttcacatccaggccctgtggtatgaggagttgggagggaaaacacataacacttgagaaagcttcaggggaaatgccgataacagagaaccaagttgtagttagagcaagaatgactttaactagtagaaccagtgaagaacatcccaaatagaggaaacaccagaaacagagtcacaaaaggtacattatttgatgttggagaatagcgacaactctagtgcagtttagaatttaaggtttattccagtttgatgtcttcgtagtcacatcccttttagtatcatgtagaatttataggcattctctatattttaacatccaggaatttttcataagaatgaacatcaatcccaatattgaaatagtaggacatggcttaatrctgatcctgaaccattaataatgatttttgttacagcttcccagccacttcttcaatttagttgtagctctgggcatgcaatgcggaataatgacatctctcctcccttatgaatcctacctcccaccaagtctctcaggaatacccaaatcagagaaaaatattaattataaaaaataagcatagagctctttcatctctttcccaaagtatttctagaattttttcacctagtttatattactacatttaaattacccactaatagaataacagtgttcttaaaatatttttagaaatccaagagaccatgttggttcttaagcaccttttgttgttcatcagctacatgtattatatcactaatatgtttcagttaggtgtctttcaactttagatatcagaaagcccaattcaaacaaccttacacaatgaagaaatttattagcttaatgtaactggaagtccagaggaaaggcagtctttaggattagtcagttagtaccttaatgaagacaccaaagattcagatcatttccattgttccactctgctgtccacagtgctggctttattccagggtgggattctcagattctcttcatacagtgggtaccaggaaggagctatatgttctataaggaggaaaaattctggcttcctcctaacagaaaggacaaccttaaccagaggccaccagcaaacctcttctacctcttctcctatctgattgacatgattccttctcatatctgagtcagtttctggcagtgaggatggatccaccattgagctaaagttagttctcccagtttttgccactcagagttgtggcrtggatattggagaacacagtcacaatgtctgcttacagtgtttgccttggttgtgttctaatgctctgaggttctttattcattcttatctgttacatttttatagtgagttaaaatatgcttcatcatactttattggtttaattgccatgttcagagctttctgtcatatagagagtagagcaattattaagcattcctttctgcaaaaagggaaaaatgctggaatagtgaaaagattgaagatagttggcaaatttgaatctgtacctccttataaccaatagtttttaacctctttcaacctccagtaattgacttagctatcatttacatagaaactttagtaatttgatttgtatctcctttctctctgtcaaaagttgcctgaagcgttgtggtaaagtagaaagtggactgggttgtgattaagtttctaattaattctagctccactgctttccagatctgtgtgatcatgggcagataacttcatctcagaccttctgcttgcttctctgtaagcctggagagaactacctgtcttctcatcaagttgtttttattggagttagtgtagcgaaaactctcaaaccgtgtttttttctactctcacaccaccacaaaaatcatcatcaatacagaagaagacttctgtgaccaaaggtatgggggtttttccctacacaccaagcagtgcacatcagctgggtattctccagttcaattctggcactgtctacctggagaatttaagaacatgccaacctatccttaagataccagtcacaagtccgggccaccccatccttcagacaccagttgcaaatctgggcctctggaacttctgaccaactggtttcaagttgggttcctctttgggcccacttcctctttgggctcaattaatttgctggagtggtgcacagaactcagggaaatacttgcttacctttagtggtttattataaaggatatatgtagaggatacagatgaagcgatgcatagggtgaagtatgggggaaggggtgcggagctttcatgtcctccctgggtatgctaccccctgggaacctccgtatgttcagctatccagaagctctctgaaccagttttcttgggtttttaaagaagcctcatgacatcaacattccttcctccagggtatgaggcaggaccctctctggagggtcttaagacccactgtcagagaggctgggtagattaaagtcctgctatagagccgataaaaggagaagaggagaaggtcagaggcctgcctctgaggcctcacaccctcagcattataacaaaagacaaacaagggctataggggttaggagccaggaaccatgaatgaaaaccaatgtatatgtatcataatgctgcagagttaaataagctaatatgaaagaaatctgataaatatagagtagcaaacaattttaaattgcctgaattattatattctaatagtaaactgtaggcagttaaagagaggaacctgaataacacagaagattctgatgctaaaaaataaatagttgatcttagtttctgagtatctaaggtgtatcagaagaagataaggatgtgtgcagcttttttgaaagtagatgcttaatgaatagttagctactagttagtatatccaatggctacttctcaagtattccctagaatttttttaacttaaatttttgccccttttctggctaaagctgtttttgaaggtatcaactaggtattataagctttagggctttgtgtagcttacaaggtatgacagatacatttattcaaattattgactgttttctcatatacactttttttttcctttcttggaatatcattcttttgaagaaccccagggtttcacattgggtgaagtttggttgttattaccaaaagagatagcacatttcattgctgagaaccctcaagagcaagacttcatatttggagtagaatgaaattaagatgacactaaagaatttgacttataaaaaactaatatatccattcaatgtcttaggttaatgttcatggtgagtctgagtatgttaataaactgtattagctatagtttctgtatctcattactattggtttgaaactgggtatatatgcttcttaaattgttgacattcacctttttgttttgagctagtcactgttatctgtcatgttagacttggggccatagctttttctaaatgaaaagacttatcttaccatattttttttcttttacataagagatactattaatatatataagccttgaaaggaaaaggatactaatgtatgttgactgtgttactatgtacaagcataccaaacatttaacatttgtatcatttaattctcccttcaacctggtgagagagtattattgtccccattttacaaaaggaaacattgaaacatagagattaagtaaacaaaattactataatggagaaatcctgctttctccttcccttttaccctcagtgggcatttttcatacctgctttcatttaattatacaactctttgaagatgttattatcattttgcagatgaagaaaaacattaacatgaatgtacaatttaaagaataagaaaatgaaaatgtgtactacattaaggaatagaagcctatataaaaggttttcgtttggttttgtttacatcaattgattctcaaatgttaaaccaaccttgctttttttcatatcaacactacttggggccggccatggtggctcacctgtgcaatctcagcactttgggaggcccaggcgggtggattgcttgaagtcaggagttcgagaccagcttggccaacatggtgaaaccccgtctctactaaaaatacaaaaaattagccaggcatggtggcacgcacctgtagtcccagctactcaggaggctgaggcaggagaatcacttcaacctgggaggcagaggttgtagtgatcagagctcgccccactgcactccagcctgggtgacagagcgagactccatctcaaaaaacaaaaaacaacamcaaaaaaaaaattagctgggcctggtggtgcatgcctgtagtcctagctacccaggagtctgaggcagagaatcacttgaactgggaggtggaggttgccaagattgccactgcactccagcttgggcgacagagtgagactccgtctcaaaacaaaaacaaaaaacaaaacaaaacaaaaaaacacaacttggtcatgaggtattgtactttttacatattgttggatttgatttatgtcatattaagtatttttacatctatattcataggaaaattggtctatagttttcttataatatcttagtttggttttgatacagggtcatggtgcccttwtagaatgacttgagaagtgttctctcttcttcaattttctggataagccttttagaattagtattatttcttccttaaatgtttgttagaattgaccagtgaagtcagttggacctggaagttttctttgtggggtggtttttaactgtaatttcaattcctttaatatatgtaaggttattcaggttatctgtttcttcttgagtgagctttataatttgtctttcatggaatttgtctgtttcatctaagttgttaaatctattgacatcaagttgctcatgacgttctcttacccttttaatgtctgtctttaatttatctctctcacttgtgatattggtaatttatgtattttctctccacccccctcctccattagtctggctagtgatttattaattttattgatctcagagagccagcatttgctttcattgactcaataaaaaattttaaataaactttatttttttagagcagttttaggttcacagcaaaattgagtggaaaatacagagttcttatatcccccccaccagcctttcccacttcaacatttcacaccagaagtggtatatttgttacaactgaacctacagtgatgtatcattatcacccaaagtccataatttacattggggttcactcttgatgttgtacattctgtgggttttgacaaatgtgtaatggcatatatctaccattatcatattatcatacaaaatagttccactctcctaaaaatcctctgtgctccacctgttcatccctacctcccagttaacccctggcaaccactgatcttttcactctctccatagtctttgcctttttcaaagtttcatacagttgaaatcatatagtatgtcaccttttcagattggcttctttcacgtagtaatatatacgtttaaggttcttgcatgtcttttcatgcatggcatgattgctcatttctctttagcgctgaatcatattccattgtctggatgtgccacggtttatttatccattcacctactgaaggacatattggtggcttccaagtttgggcaattatgaataaaactgctataaacataaggacatacgttttcgactcatttgggtcactaccaaggagcatgattgctggatcatatggtaagagtatatttagttttgtaagaaactgccaaactgtcttccaaagtggctttaccattttgcattttactgatctcaaagaaccagcttttggtttcgttgacttttttctatttcttttctgttgtacgtgtatgtttttcattcctgctcatctatcttttctttcttctccttctgtgtacttcccttcagaagaggaggacacacttactgcttaggattagcttgcttttctctttctaatttttttttaacttttattttaagttcaggggtacatgtgcaggtttgttatataggtaaacttgtgtcatggaggtttgttgtacagattattttgtcactcaggtattaagcctagcaccctttagttagttttcctgatcctctccctcatcccactctccaccctccagtaggccccaactaatttcctaaagtgaaagcctaggtcactgatttgagaccttcttttctaacattcagaagtatattgtttagtttccagatgtttggagatttttttttagatgtttttctaattttaatttctaatataattttattgtgatcagagaatatactttgcatgctttgaaatccttgaaacttagtgagaatgttttatggctcagaatatagtctgagttggggtgttgttccatgtgtacttgaaaagatgtgtattctgctgtaatttggtggtggattctataaatgttaattagatcaagttggttgctagtggtgttcaagtttactatgtccttactaagtttttgtctactagttgtgtcattattgagagatttgttgaaatctctgacaataattgtggatttgtctgtttgtgcttgtaattttatcaggttttgctttaggcattttgaagctctgttactagcttaggatttttcttcttgatgaattcatccctttactcattgtgaaattattctttttattcttagtaataatctttactgtaaaatatactttatctgttattaatatagatactctagctctcctttgattagtgttagcccagttaacaatcctttaacctttatgtgtttttatatttaaaatgggtttcttgtagacagcatatagttgggttttacttctttttaaatacaatctgacaatctctatcccttttaatcaggagtttagaccatttagtcttaatatgatgactggtatgattagacttttgtctactgttgtgctgtttgttttctatttgtcccatttcttctttgcatttttctctcttttcttggcattcttttggattgagaagtttttaatgttctattttacttgcactattgtcttaggaactttgcctcttttcttttttagtggttgtcctaggattacattctatatctttaacttacaccgtgttcctacacattatattatacaacttctatattttacttctgtatttgttaaaaaccccacagtagattgtaattatggttgttttaaaccattttattttaaagagttgtaaaaataagaaatatcttttatagttacccacatatttactccactgtacctcatgtctttgtatggttccatgtttttgtttagtatcatttttcttctgcaaaaaatctttctcaatattttttattgtgcagttctactggtgacagattttctcggcttttatgtgtctgaaaaattacatcaacatttcagaaagatatttttactgggtaccaaattgtagtgtatcacctccggtttggtggttggctaggaggactcgggacttagcatatagtcaaactcatggttatgacttatcacagcagaagggtacaaagctaaattagcaaatgggaaaggttcatgggtgaagtctggaggaaacaaggcacaagcttacacgaatcttctcccagtggaatcatgcaggatacatttaatttaacaatgaattgtgacaacacatgtgaatacagttgaacaggaagctcattagagactcagtgcccaagggttttattgggagctggtcaggtaagcgtcctctgcctagcatgtagcaaaattccagtttccaagaaggaaagcagatgttcagaatattgtttgcataaatacttcaggcacagtaaaacaccctttttagttagggaatgtcaggaacccttttgaagttcaagttcttagacaccagccaaggcctaaccttacaagtaggcctttctaaggatagcactcctgagcctgctgtgttacctttttcctgcatactaggttgccttgtttttttccttttctgtactttgtagattttaatttattgtcttctgacttgtatagcttcaaggagaaatctgtgatgacttatctttgctccattgaatgtaatgtacctttttacctctggctgctttaaatgttttctttatcattattttcagcaatgtatgtgtgaatgtgtgtttgtgtttatcctgctagatattgcttgaacttctgggaactgtgggtttgtagttttcaacaaagtggaaatttctgtagctattttttccaatattgccctactctttttgttttcatgctttcattatggttatgttgattgccgacattgctacagaggtcatggcatctttattttttggaggggttatgtgtgtgtgtgtgtgtttctctctgtcttcatttttggatagttttattcctgtgtcttcaatttactaatactttcttttgtagtggctaatctgctacaaatcttatataataatatttttatttcaagtatttttttatatgtagaagttttatttgattcttttatgtttctttgtctcctcattgtgtttgggttttctcttatgctgttgaggaaacatttgttatagctgttttaatgttctcatctcttaatttgatcatctctttcatttctggttctgttaatattgactgtttttctagttcacaagtcacattttattgcttcttgataggtctaatagttttttatcgaatgctcattattgtgaattttatgttatttgctggatttggttgcattattttaaaggatgttrgtttttttctagtatgccactgttacttacagataagttcgatcctttcaaagcttatttttatgcagcttcagggagaatctagagtagccttaaggactaatttaacctcacttctaatgcatggtccttctggagtcactcatggctgccctgctattcagcaagatttcaccactttgggtaatacaaattttaacaattcctggccttttgtgagcactgacagttgtttatcttacaactcctggtaattttctttttctaaaggttgatgttttattttgcccagcctcttgggggttcaccctccacatgtataacttgtattcagccaaagatccagtaggactgctgtgcattttttgggatctctttccgtgttgatctcttctctcaggcatctgccccctccccctccccctgaattctagctgttttggcctccctaaactctgatatatgtcttttcaattcagcaatgttcctaggttcttatgaggttacctttccctgcgccattgtttgtaaattacctccaggcagaagctggagggccctattattattgcccttttagggcaatagtctggtatcatagacttgtgctgcctttgttcagtgccagcaaatagtttcctctattttatccaatttctggttgttagggagaaggatatttccagaccctctttgtccttcatattcagaagtggaaatctccctataaacattgcatacttttccatttataccataaatgtttcccttttctgaagcaacttcatcctcgtaatgtgtgaaaatgtcaagcctttacttttttcttattatattcagaagataataatgatgcatgtgatcaggatctcaaacttcagattttgctcagattttgtttcaaatttttgtattcacaaaaaatctcctatgcctttgatgaacatctaggtatcactgtggatctgggctccaaggagggtgaggcaaggggggcgcctaaggtacaaaatttaaggagacactgactctcagatgtcaatcctgtgcttgtactacctggagagtaagtgtctccttaaattttgtaccctagatgccttgtttgcttcagtctagtacacgctttgcactggatattccagactaagatcacttttattacctagggcattagtctcaaaccattattaactagatcacatattgcctttgtagtaggtgtcttttttaccttcatagttaaattatttaaacttctctgaccatctatttttttggaggagttgtaataaagtctgatgtaaaatgccagttccttagtattggctgagaaatgagagaagaaaagaaaagagtattcagggtagcaaatactgtcccacaaagccaaaaccatgtgtactgaagccttacctatttttagtttagtcggccttggccctagaaaacagttcctctccctacctaggccagattccattaattccatgtgggctgttgcccactgggcatgcagctgtatttgcagtttgagagtcccaagtaagcctgactaggcttcaaaaatgaatctagatttatactaaggaattttaatatgggtcagagacatgcagttggtctctgatggtgggaagaacagagtttttaatcttacataaaatgtactctctttgaggtctttggtttgtgacccacttttggattgccttagagtgttcttgcarctggaatgataaaggaatctcttttctctcttcttagaatattaaaggagacaggaagaagtccagatgaagtgactcatggaaccatttgtttatctgaacctgagctaaatcttaggagagaagggtaaaaataattcattcttattatttttagtccagattaccaggatttttcagatagtgatgtaggtatgggttctggcagtaataaacggcaattttacccagaatggcatctgttaaatatcttcctctggcacttgaagtggtatttggtatctgtttgatagttcaggggttgttctaaaacattgatcctgtgtgcagaaagtaaccattaatctcatgttactactgcttgactcaattttctttatttttattttcttggacttttcttttttaaaaaataagaagagtagcatatttgtaccatctgcaaagcacttttataatggattggaatgtgaaaatctctaatccagaaggaagattcttatatagtctttatagataaatgcaatgtacctttctttaattactgggtgaggtaatatgttgtgaaagaaaatagtgaacttggattcaaaaaaacctaattatagttcaggttgaactgcttgtagctctgtgaccttgagcaggccagttaatctctttgagagtcacttttttccatctgcaaagtatgtgtatgtatgtgggaggtgggggaggatgtgataaaatctgcctgcctatttattcgtgtcagtgtgaagagcataataaagatgtgaaagcacttgggaaatgtgtaaagaacatatacatacaaatgtaaaaatgatatttataagtattttatctcagcaaaatcaagtcttgtttttatctttgggacactgtgtaaatatagtctcagctaaattttttttttaaaatcactgatagcttagaaaaagagaagtaaaaaaatacgtatattggaaaatggatggaaaacacatcaaaggttacaagttacctatgaaagaattgataaaatctccttagagtttgtgtgtgtgtgtgtttgtgtgtattaacaaaatttgaaatttttacttaccttctctttcacctctagactttgaaagtctgtatcagattttgtgacatattgtatgtggattgtctactttagattatccatggaaaactattttttaaaatcagtcgtgttgctccttgttgtctaagacaattctggatgttttctcctgattggtatgttttcaggggaatgcaaactaatttaatatagccctggtgtgtataatgagggtgttaaatctgtcagaacacaaatcacaatgattgaaatatgaatgtaatattttggtacctttgaaactattaaattactcccctatattacattaaatcagtgagagaattcccttggttggttcattcattcattaaacaaatattaataccattcctactattgccaggtactgttgtatcacatacaacagtaaacaaaacagacaaaaatttctgcctctatggagcttacattctagctgagagggaaactgaaactaacagataaaatatatactgtatcagatagcaaaataaaggagggaaaggggatgggggagtgttggaaggcatggcagttggaggagggcaggcctgggaaggattgtgacatttgagtgaagacctacaaggaatctgtacagatatctcagggaagaacattcctgttctaaggtatagcaagggtaacagatttgaggaaagtgtgtgcctagtatgttcaaggaacaaggaggaggctagtgtgactgaagtggagtgagcatggagtgttaggctggtgcagacataattgcggtttttgcattgtttaaatttgctgtttggtattggaatacattattaaataaatgtggttatgttatacataattttaatgtgcatttcttgctttgttttgctaatgacttattacttgctgtttattttatatttattttagactatggaaatgatgttagacaaraagcaaattcaagtgattttcttattcaagttcaaaatgggtcataaagcagcagagacaactcgcagcatcaacaatgcatttggcccagaaattgctaacaaaggtacagtgcagtggtggttcaagaacttttgcaaaggagacgagagccgtgaagatgaggagtgttgtgcccggccatcaaaagttggcaacgaccaattgagagcaatcatcgaagctgatcctcttacaacactagaagttgccgagaactcaacatcaaccatcctacggtcattcagcatttgaagcaaattagaaggttgtaaaagctcgataagtgggtgcctcatgagctgactgaaaataaaaacaatcgtcattttgaagtgttgtcttctcttactttgtgtaacaacaatgaaccatttcttgatcagattgtgacgtgcgttggtaagtggattttatatgacaaccgctgatgaccagcttggtggttggactgagaagaagctccagagcacttcccaaagccaaacttctaccaaaatgttaatggtcactgtttgatggtctgctgccggtctgatccactacagctttctgagttccagcaaaaccattacatctgagaagtatgctcaacaaatctctgagatgcatggaaagctgcaacgcctgcagccagcattgatcaacataaagggcccagtccttcggcacaacaatgcctgacaatgcgtcgcacaaccaacgcttcaaaagttgaatgaattgggcacaaagttttgcctcatccaccgtattcacctgacttcttgccaactgactaccacttcttcaagcatctcagcaactttttgcagggaagatgtttccacaaccagaatgcagaaaaagctttccaagagtttatcgaatcccagatcacacatttttacactacaggaataaataaacttatttctcattggcaaaaatgtgttgattgtaatgtttcctattttgatgaataaagatgtgtttgagcctagttataatataatgatttaaaattcacggtacaaaaccgcaattacttttgcaccaacctaataagattaaaaccagtagaggtgggtattttgagaaccatgtatttcaaggacggaattattgtttgtgtcagctactgctcataggtaaaataagaggaagtcggagaatcgattgttgtgtttagcaatgtggaagatgttggtgaccttaaataagtgcaagttggtagacagatgggatgaaaagcttggttgatatggattcaggagaaaatgggagatgtggagacagtgagtgtagataacacttttgagttttattgtaaagggggaactatgcacatttggtgtgtagagttaagagagtgggctttaaaaaattttttggttctatgtttaatgtgacaggaataatccagtagagagggaatatttgacaatgcagtagaaggaagagaaaattgctgcagcagttttcttgaataggtgggaaataattgggattacctttagttttccaaagtgaccattgtatttctttgatgcttataattcacattcttcccttttaaagaacatcagtgcctgagcctttttatatacatatcctttcttatgtctgtaccttacccctcacatgtatacttttttcttttttttaaaaaaccctgcatgtggcattcaaacacatgtatgcttttatcagagcccctaaaatactttattacatttatttacatgtctcacccattactggattgtcgataccttgatctatgttattactcaactattggttctttgactgtagtgtttttattcattgctacatgcctatattagttacccattgttgcataacaaattactttaaaacatagccactcaaaacacacatttattatattgcagtgagtcaggaatccaggaacagcataggtgctgggtctcttacaaggttatgaaccaatgtgttgacagggcctgaagtctcatcagaaatcttgatgtgaaaggatccattttctaggtcactcataaggcaggattcatttcttctcaggctgttggccagaggcctcccttggacccgtgccaaaggaccccatagagcatctcacagtatggcagttgacttagagcaaacaagcaagagggcaagaaaaagtgccagcaaaagagagtgctagcaagaagcacatcacaatttttataacctaatcacagaagtgacttcccatcactgttgccatattttctttattttttaaaattgagacagagtcttactatgttgcccaggctggtcttgaactcctgggctcaagtgatcctcctgccttggcctcccaaagtcttgggattacaggcgtgaaccaccatgcttggccaatattttcttctttataagcaagttactaggtctagcccacacttaaagagggttacacaacatgtgactatcagaaggcagggatcactgcagggacgtattagaagtccgccacccggtccccaaactctagaactataaaaatgcttaacttgttgaatgaattaacctttttccaagcaccctcataactggtagtgtacatttgtaagagggctggtcaagggtaagaatttggtttgagactgtatacagaataacttgatactcatggattatttcaactgtttcttgtttccttaatgatttgcttttatgaaataatgttaatgaaaagttcaagtcattttgtatcttcaggagctaagcaaaaccaggaatgctattcaagaaaatcagaatacatgcagtatattttaataggaattctagaaataatctgatagcaagctgtattttgagataattcaagcttccagtcattcctaacatatatacccttttatgacatggatgagcataaggatatataaaaatctgtgcaattgaaatgtagttgaatttgatctctactataaaataatctttataaaaataagattttaacaggtaggaataagcatcatcaatcagatcatggatttcaatttttttgcatagtttacatgttgaggtgatttaatcttttgaagaaaactaaggaatctcatcctcttataaaatgttagatattagaaataacttgtccaatcctatatttttatagttgaggaaatggctacccagtgacgtacccaagctttctggtggcacggccagtgccagatcccaggcctcctgactccattcagtgcactgtaccatgccttaaaccatactggagccacttggggagtttaaaaacttttatgcttctcttatccccagaccttttgatttaattggtatgggttagaacttggtcattggaagttttaaacacgccccaggtgattcatgcatcatagtctgggaacctctactccaaaaagaattagtgtgcttgaggaattggaactagagtgaaatcagtggtacagacttctatccgttatgattccttaatcacttatttggctgggttttatcagagtagtaagacaattttttacattgagaaataattaagatatatgcagagcaaagacttccttaataaaactgtcctttcactagtattttgtgagatagcctgtgacaaaatttttcctaatcatgaaattggagaacaattttttgacactaatcaggcaaggagaaagtttcgtgccatctgtgttgtggcatgctctgctgttgttttaactagataaaattctaattactgttaaacagattgtttatgaggttgtttttaatattttagagcaagtgcataaatataaagaggcaaagaaatggttccagatttaaaatacagtttctttaaaagtaaatcagaatttgacacactgggttgtttaattacacatttcagtttgggtccttggtactgcaatgttgcaaggcatatgaaatttgcagtttgttacaactattctgttgtgtcgttttatacttttggatataaagctgaccaaacattctaactagaaaatactaattcatgattgataagtggcattttgtttctacatattgttcttttaaacaaggtctttctttgataatgacagatgtagggaatatgaagcagaagaggtaagaataggagattatgatcagatcaaagcatttcagaatgttaaatcttttattgaaccagtatcagggtgttgacaagaaaagctatatatttgggttgctagagtagaagcgataaggggcatattagttttctattgctaccatcataaatcaatacaaacttggtagcttaaacagaaagctttttaatcttacagttctgtgagtcagtaggccaatccaggtctcattgggttaaaataaaaatttcagcatggccatgttcctttctggaggctgtagggcaagatcagtttccttgcttatatgaggttttggtagaattcacttccttgtggttgtagcatttgtcttgatcagagccctttctagcacctacattccaccctcgttccctggcatgtggccctccttcatcttcaaagccagtaacaaaggtcaagtccctctcaagcttccagtatttccttctcctttgatttaaactctctgatccaccttctgtcttcctcttccactttaaaagcctcatgtgatgagattgggcctacctggataatacagagtaatctctcccatctcaagttccttaaccttaattacaactgcaagtcccttttgccatgtaaggtaacttaggttccagtgcttaagggcacagacatctttggagggccattgttctgcctgtcaaagagggctagatcactggagtcaaggaagccaagtgtcagtattgacatagctgttgaaagtcttcatttatacaacaaattttttttagtgcttgctgtgtctagtcattgtagtaggcactggggctattgtggtaaacaagacagacatagtatctgcccttgcctatctagcagtatacttataaaaacaagtaaaacatatagcattgctttataaagaattcttcatgtattccatatttatgtaagctctttgaaagccagtactagtgttctttgttttggccctttcctcatcccatcactacagcagtgttttacatactagatgcttaacagatactgttaacaaaggcttactttgttttttctttgcattgagttagaaacctcatttatctctctttttttctattttctgcttcaaaagcagtgaggaattttgagttcaaaaatccagacttagaggacaatttaagatttaatcagatacccactgaggaatttttaaaaagtccttaagaatgaccatgtactccattttacttttcttggtaaagactctaaagtgctaaaggcagctctgttttgctttttcctcctcctcctcctattattattattactgttatttttgagaaagggtctggctctgtcacccaggctggagtgcattggtatgagcacaggctcactgtagccttgacctcctcagctcaaacagtcttcctacctcagcctcccaacgaactgggactataggcacactgtaccacatctggctattttttacatcttctgtagagatggagtctcactatgttacccaggctggtcttgagctcctgggctcaaactatccttacaccttggcctcccaaaatgatgggattataggcatgaaccacggttcccagccttgctttcacctcctaaattcaacagtcagagagtacttacccaattaaaaaaaaaaatcaacagttgctttaaaccagtattcacctatagtgaagaactgccaactcagaagcaaattaaaataaatttttcaatatggcttttctgagatagatagacttttaaaataatggaagagatttactatctgttggtcactgctctcagagcttctatcttcctcatatacaattctctcttgtgctcccactgtgtgccgagtgtgggtctacccttcatggaaaaactgcggtattcttaccaatcgttaaatgccttctaaaagacagttatttgtagttttcttagtgatagtcctggttacaattctgtatcatgtagtttcccaatgtagcaataggaaacttcagtaatggtggattggagtaagcataggtatatgagatttatagtctacacaggcattgatttcaatcatagaactttttatcagaactattagcaagtggttaaatatacttgtaacacaggtttgggctacatagtgttaagtgtcacatgaggccttcttaatttcagtacataccaagttctccatcccaaatcccttcttgattctttgatgatttaacattatttatggataatttcttattctgacctttaatgtttctaaacaaatagcctaaatatattttatataaaacttcatttctgaaagaagaacttttggaataatgggtggaaagttcatttgatttgcttaagtgtag

SEQ ID NO: 94199 - DNA, 47618 bp, Homo sapiens
gcttgaagtgagtggagattgtgcaactgcactccagcctgggcgacagagtgagactccgtctcaaaaaaaaaaaaaaaaaaaaagaatgagttcatgtcctttgcagggacatggatgaagctggccataattctcagcaaactaacacaggaacagaaaaccaaacaccacatattctcataagtgggagttgaacaatgagaacacatggacacagggaggggaacatcacacacgtggacacagggagggaaccatcatatgtgccataagatttgcaagaaatcaaaaagcatttaaatatccacatggaagtgaggcaagactgatatcgtagaaaagtcaaatcagccgggtgcggtggctcacgcctgtaatcccagcactctgggaggccgaggtgggcagatcacgaggtcaggagttcgagaccagcctggccaaaatggtgaaaccccgtctctactaaaaatacaaaaattagccgggtatgagggcgcgcgcctgtaatcccagctactcaggagactaaggcaggagaatcgcttgaacctgggaagcggaggttgcagtgagccaagatcaccccgctgcactccagccggggcaacagagcgagactctgtctcaaaaaaaaaaagaaaagaaaagtcaaatcagtgatagtaagaatacgcttcagaagttctctaagaatgtagaggaaaaggataaagaaatgaaagtaacgagaatgatagttctgtgagactgaattttaaaactccaatataaatataatacatttttcagaatagagtagaacaaaaacaacaaactaatgaaaaaaagaaatagaaaacattttttcttgacctttagaaaaatcatgttctataaaaagagatcctcacatagacatatcctggcaaaatatgtattgaaatgctggaaaacttcaaaccattccaggatctgagaaaagtacttagaactgaatgaaaatcagactgaccctggctttttctctgtgatagaaagttcaagaaaacaccagaataccatctacacagttgaggggaagggttagaaacccaaggagtaaccagagattttgaaaacacacttgtgtagtctgatatctgtgaaaataacatgcttggctgtttttgctttgagagtacatatcactaataagcagcttaaaaaaaaagatcaccttagttcaaccattgtggaagacagtgtggcgattcctcaagaatctagaaccagaaataccatttgatccagcaatcccattactgggtatgtactcaaaggattataaatcattctactataaatacacatgcacacatatgtttattgcagcgctacttacaatagcaaagacctggaaccaacccaaatgcccatcaatgatagactggataaagaaaatgtgacacatatacaccatggaatactatgcagccattaaaaagaatgagttcatgtcctttacagggacatggatgaagctggaaaccatcattctcagcaaactaacacaggaacagaaaaccaaacactgcatgttctcactcaagtgggagttgaacaatgagaacacatcgacacagggcgaggaacatcacacaccggggcctgttggggcaagggaagggagaccattaggacaaatacctaatgcatatggggcttaaaacatagatgatgggttgataggtgcagcaaaccaccatggcacatgtatacctatgtaacaaacctgcatgttctacacatgtatcccagaacttaaaattaaaaaaaaaattaaaaataaagcatcagacgtctccaagtggtgctcctagcatatggtgacacatgtgtcaccagctctgggatggagtccaagccgtctctaaaatattttaaaggtttaaatatttaaacatttataaataagcatcatttataaatatgttaaaatataaatgatgcttaagtaccaatgaagtattaaagtataaatataaaattaaaagcatgtgaaaatataaatagtacctaagtaccatcaaaggattaaaatataaatgatgatggccaggcgtggtggctcacgcctgtaatcccagcactttgggaggctgaggcaggcggatcatgagatcaggagttggagaccagcctgaccaacacggtgaaaccccatttctactaaaaatacaaaagttagccggggygtggtggtgcacacatgtaatcccagctactcaggagactgaggcagattctcaaggagaatcgcttgaacctgggaggcggaggttgcagtcagccaagatcgtgccactgcactccagtctgggtgacaagagtgagactccatctcaaaaaaataaaaaataaaataaaatataaatgatgtataagtaccattgaagtattaaaatatgaatgatacctaagtaccattgaagcattaaaatataagtgatacctaagtatcattcaagtattaaaatagaaatgatacttaagtaccatcgaagtattaaaatataaattatacctaagtaccactgaaatgttaacatataaatgatacttgtttatattttaacacatactttttcctgagagtctttgtataaaacttatgctccaggaagacttgctatgtttattctatggcttcaaatatctgaagccacacagctgtgaaatcagagtaccctctttttccccagtaaaaagtcctgagtgaatggaactccacaacaaaatgatagtggagaaaagcaatgcaggctaagcaggctaatactaaacacaaaagcaaggtcagcaaagaagtgtctagctacagtttatatttcagaataaatttaaaagcaggtgtctcatgaaacagagctgagaaattgggggcatttgtgacagtcacaggagctcatccacccttaaagaggcctggcctcctgctctgtagggctgggccaagtccttgataccctggagagagctcacttctgcctctctttggagtgtgagaaacacactcacccattcaaacccaaagaatggacttagaggcatgaagaacagtgaaagtgagacttttttttttttttgagagtctgtcttgatctgtcactgaggctggagtgcagcagtgcgatctcagctcattgctgagctgagatcacctcccaggtgaatctccatctcccaggttcaagtgattttcctgcctcagcctcccgagtagctaggattacaggcatgcgccaccacacccggctaatttttgtatttttagtagagatggggtttcaccatgttggccaggctggtcttgaactcctgacctcaggtgatccaccagcctcagccccccaaaatgctgggattataggcatgagccaccgcacccggacaaaagtaagactttttaataatggttttgcaagatcggatgtgtgatgggcaggcacacccagtgcagtttcaacaatttatcccctagagcacaggtccctccccagttcctcacaggctgagtaatatggggttgcagtcttcctggacatcacctaagttccattatccccttattaggttacatcttgtcctcttccctacttgaagtttcgatttcccaatggctaagctttctttccttttatggattagacacccctgccacttttctccctcccctctgacttctgtgagttttatcactcttcccagatgtctgtacccgtgcatcttgtcacatccacaagggaactgcccagacttgtctgttttctgaaaatggaccacttaaaaagtacttcttacagggttctccacagctttactaagcatacactagttgaggccaggaggtcctcagccacacagcctctggcctcctatccttgtgtcccttggcctccatcccactggcctccaagggacaggtgcctttccctgctctggggcaaagccctcctccatccacagggtccacctctgtcctccctggtggctccttgccatattaacgtgttcaaattctaccccagtcagaaaactgcaccccttgagccctgatgctcccttggcccccaagattaccagcttcagggaacctcccagtttttgtccaccttatgacctccaagcaacccagtcctgagggcactttcctctctgcctctgcagccccgcactggcctggaaatgctccctttggtggccagagcccctacttctcccaggttctcccccacccccagggtccagcttccttcctcctgccctcaccttggttgcagttttcatggttatatttgtggcttttttctttttcttttctttttttttttgagatggagtctcactctgttgcccaggctggagtgcagaggcacaatctcggctcactgcaccctccacctcccaggttcaagcaattctcccacttcagcctctcgagtagctgggattacaggcacccgacaacatgcctgcctaatttttgtatttttgtagagatgggatttcaccatattggccaggctggtctcggactcctgacctcaggtgatccgcccgcctcggccacccgaagtgctgggattacagacgtgagccaccgtgcctggctcatttgtggctttttaaaaaatcttcctggaggacacatttttccctctatagcgccagccacccagatccacgcctttgcttaagttatttcctcaagacagggatgccctcccttcttcccctgggactgatatgtcctgccagctccttggagaactttctccccatctatcctctaattcacagccacccccggttacatgctctctttccgtgcctctttcgtgtctcatgaacctgtccattttgacacttaacacactcggtccaatcatcattgtacattctgtccccactagacccagacggccttgagggtaaggtaccaaggactccccatggccagtgcccaccggtgctgaaatgaatgggaacgatgcagtcccaagacctcaagagaaccttcccagtcctttctccttaattttttttgtgtgtgtatggtgttttttaattttttcctcacttgctttcttttcttttcctttctctctttctttctttctcctgcctccctcccttcctttctttctccttccttccctcctttctttctcctgcctcccttccttcctcctttctttctccttccttccttcctttccctccctttctttctctctctttctctctttctttctttcgctacaggacgtcgtgtgtttgcccaggctggagtgcagtggcacgatcatagttcactacagcctccacctcctgaactcaagcgatccttctgcctcagtctccagtgtagctggcatcacagacgtgctcctccatgcccggctaatttaaaaatgtttttgcacagtgagggctcgctatgttgcccaggttggtctcgaactcctggcctcaagagatctccggcctcagcctcccaaagtgctgggatgacaggcgtgagctattgcgtccggccccagaatgcacttgttaaagcgttgtggggctttttgaaatgacaatatattcatatactacaaaatttaaaagacattggcggggtggggtgggggtaaacccactgccactgccccgccccaggccctggattcccctaggcacagtgttactctttccttttggagttttccctgatcattgaagttatgcccttgtcccttctgcacccgcgcttctgggcaccgagctcctcccgctgaagtgatcggcttgcactgactgcgcttgggcttcgcgctttcccgcagcggccgggccttggcgcctggacgccccgccgacccccgcggccgcgcgccctgctccccctggcggccgcgccccgcactgcagtggccgcgttggggcccggccgggggaggggtcgcgcggcggcggcgtcagcggcggcgcccgggcggtgggagccgaggcgccgagcaagatggcggcgcgagtgctgcgcgcccgcggagcggcctgggccggcggcctcctgcagcgggcggccccctgcagcctcctgcccaggctccggtgagcagcgccgcccttcccgggaggtgccggggaggggccgccgcgaggcggagggcgcgggtttcccggcgccggtctccgccccggccctgtccccagcgcgggtggctgcccggcctcggggcagtggggccggagctggggtggggccggagctggggcggggtcggggcgtcctcgggctcaaggtcacggaggggacgggccgctctgcggctccaccctcgcccgggaaggcccccgaggcttggcccggaggccacatcctccccgcggcgctggcccggcctgcagggccctgaccggcgcgacccgtggccagggacagggacagcgcgcgcctgaggccgcaggccccggacgccgtctgctgggtcctcgccggaggctgttccaagcctgagtggctgcgtctgccgaggacgttggygaccctggtctctgaggtgccgggagtagggaataaaagagtaaagcattgtcccgggccagctctccgcggagsgtaggggaagttagagcttggaggaggtcaaatcacttaacgtcttggagttgaaatttaaagccggccgtggatctaaaagtacttagagttatcagcactaagttcaggcgtggggctcttgtttaaacttttttttttttctaacttcagtggattggacgtttggttgtccaaattcatcaccttgatatttgcatgtgctgttttccacattcaaacagcaaagcctatcctgmcttacccagagttgctttctcgtattcattgctttgggtagtttaaattacctaaggaactgtgtgttaaactcgccatgggccagggaggtttcagtaacatggtttattattattattattgttgttgtttatttatttatatttttgagacggagttttgctctcgttgccccggctgaagtgcaacggcacgatcttgtctcactgcaacctccgcctcccgggttcaagtaattctcctgcctcatcctcccaagtagctgggattacaggcatgcaccaccacacccggctaatttttgtatttttagtagagacggggtttcaccatgwtggtcaggctgatctcgaacycctgacctcaggtgatccacctgccgcggcctcccaaagtgcagggattacagtcgtgartcaccaggcgcggcctgatctttttaaaaagatgagtctgacttgggagagggggcagaattaagggtagtggccagctgagtggaccctggcactgagagttgagagtttgcagagagctgttctgccaaaatgtgagtgcctaccacgtgccaggcactgttgactgttgagagacatcagtgaataaggcgtccaaggccatccggagcttaccagtaattcaggagggctggggaagaagaattcagagcagtttaggacctggtaaagtttgtgaaggctgtgtgctattcaagtggaaacgcaaacagacagttggcagtatgactcctcaaaggaggtgtctgggctacaggtaacatttaggagttgtcagtatataggaatgctaaatgttaatagacacatggatttcattatactgtttcgtatttgatttacgtttttcataataaagcctggacgcagtgactcacacttgtaatccctgcactttggaaggttgcggcaggaggattgcttgagcccaggagtttgagaccagcctgggcaacatagtggaactctgtccctaataataaataagtacataaataaaaatttgtataatgaaactttttttaaaccataggaagccgggtgcagtggctcaggctgtaatcccagcactttgggaggccgagctgggctgatcgcttgagctcaggagttcgagaccatcccaggcaacatgacaaaacacatctctacaaaaaatacaaaaattagcccggcatggtggcacacgcctgtagtcccagctacttggtaggctgaggtgggagtatggcttgaacctgggaggtggaggttgcagtgagccgagatcatgccactgcgttccagcctaggtgacagagccagaccctgtctccaaaataaaacaaacaaaaaaatataggaatgtgtgagattgcttgaggcgagagtgtggagagagaaggggctgcaaagcaagycctgggatgtgcagcgtatataggctgaatgtaggagggggagctggcaagctcattgttatgtggcagtggccaggaggagggagggagtgccatccgctgccaaagtgttaggtaaaatgacagaagaaaacaggatttgctgaatcagtttcagcaagggagaagggcgtcctccygggagcctcatccctgcctgtacattagccagcgtatttcacttagtgctgctcagcagcaagcttggaattcccagccgcttcctggacattgcataagtgtctcacaggtgcttaaaacactgctgtacccaggatttaactcctcttccttctgtgaagcctgcttttctttggttgttcttctccagtcatgaaacattttccatgtggtggcccaggccagacaccagatggtcttccccaagcccatccctctttttcccgccatctatcatttaccaaatctgtcagttctgcctctagtatgtcttgaatccaccctctccatcttcactgccctagctcaaccctcagcaatactcgtctggattcctacgaagagtgtgggctcgaacctgttagtgaaggggatgactaaagaatttttttttttccttggagatagtcttgccctgttgcccaggctggagtttaatggcatgaccacggctcactgcagccttgaccttccggacttaagggatcttcccacctcagcctcccaagtagctgggactacaggcccayaccaccatgcccagctattatttatttatttatttatttatttatttatttgagacagagtstcactctgttgcccaggctggagttcagtggcgtgatctcggctccctgcaacctccacctcctgggttcaagcagttctcctgtctcagctacctgaacagctgggacttacaggcgtgcaccaccacgcctggataatttttgtatttttagtagagayggggtttctccatgttgcccaggctggtctcaaactcctggcctcaagtgatcctcccaccacggcctcccaaagtgctggcattacagggatgaatcaccacacccggctgctaatttttaatttttttgtagagaggggggtcttgctrtgttccccaggctagtctcaaactcctggcctcaagcagtcctcccaccctccgcctcccaaagttctaggattataggtgtgagccattgtgcccagccacacgtctaaagaattctaagcggacattttcctagtagaaagatctctatgacacaaaccttgactggttcctaatccctcctccctgtctgcccccattcccctacccacaagagcaatgaaagacattttggggagaactggggatattttaatagggagtggatattagatatgatggaataattgtttttctcagatgtgatgatagcattgtagttctgtcattgtgttttggagrtacatgctgaaggatttacgggagaagtatcattatgtccaaactctactttcttttttttttttttttcctgagacagagtctcgctctgtcacccaggccggagtgcagtggggtgatctcggctcgctgcaacctctgcctcccgrgttcaagtgattctcctgtctcagcctcccgattagctgggactacaggcgtgcgccaccacaaccagctaatttttttgtatttttaatagagatggggtttcaccatttggccaggatggtctcgatctcctgacctcgtgatctgcccgccttggcctgctttggtctcccaaagtggtgggattataggcgtgagccactgcccccagcccaaaactctactttcaaatggttcagtagaaattaaaaagcaaatatagggccgggtgtggtggttcacacctgtaatcctagcactgtaggaggccaaggctcacggatcacatgaggccagaagctcaagaccagcgtggacaacatgatgaaaccctgtctctactaaaactacaacatttagcagggtaactacaacatttagcagggtgtggtsgtgcagggctgtagtcccagctatacaggtggctgaagcaaggtaattgctcgagcgcaggaggtggaggctgaagtgagccgagatcgcgccactgccctccagctgacatgagagaacaaggccctgtctgaaaaaaaaaagaaaaaaagaaattaaaaagcaaatatatatagagaaaaacttttaatggtaaaatgttcatttttaaaatctagatgcagggcagaaaagtcttgtcatgtttaaactcctctgggtttgaagtttctggaaatgaaaggtgtgggaacaggtctctggagcagcagtgtggaagacggggtactggggctggatggagtgtggtggtggggaggggagtcagggagctgctkctttaaggcaggagtcttcttggcatgggtctgtcaacctcttctctcccccgggtctgtgcttccaaatgctggbgctgtttgcacacttgtgtctttggccttcactggttctgcttagaatctcccttccatgggtatctacctgaccatctgctcctcttctttccagtcttccactcaacaggtacttcgttagagcaggcccccaggctgcccttacccatgccacaacagctacctacttccttgtgtcatcattgaagagcttgtctgtttgagttgtgatcgtgtttgtctgtctgccctcaccagcaaactgagctcccgtgaagtcagggccaggttcatctgtgcatcgtcagtggctgacaggtgtagtgcacagtctgtaaataacagtgatcatattgccgggcgcggtggctcacgcctgtaatcccagaactttgggaggccaaggtgggcgaatcacgaggtcaggagatcgagaccatcctggctaacatggtgaaaccctgtctctactaaaaatacaaaaaattagccgggcgtggtggtgggcgcctgtagtcccagctactcaggaggctgaggcaggagaatggcgtgaacccgggaggcggaacttgcagtgagccgagatcccaccactgcactccagcctgggcgacggagcgagactcwgtctcaaaaaaaaaaaaaaaaaaaagatcatatgaatgaagcacggtgtgctcctgctgcctcatcctgtggtctcagcgttaagtcctttcccttcttcagtttcctcttccccgcctgatcagcactcacaagcttcttctgaatgcactcctttctcttcatccccactgccatcttaaccccagaccatctagtgagtatttattgagtgccttctgcatacctggtgctgctgggcatggcagccagggtgcccaggaagcatgttcctggccttygttgctgcagccatataccacgctcctgccaggctgcttttgacacttagatttttttttttttttttgaaacggagtcttgcactcttgcccaggctggagagcagtggcgtgatcttggctcactgcaacgtccgcctcccaggttcaagtgattctcctgcctcagcctcccgagtagctgggaytacaggcgtccaccaccacacctggccatttttttggtattttttagtagagacagggtttggccatgttgcccaggctggtcttgaattcctgaccccagatgatccgcccacctcggcctctcaaagtgctgggattacaggcatgaggcactgcgcttgtccgacacttatattttttttgaaaacttgacagcatctcaccctacacagaataaagtcgccctcgcctcgccctcacggtcctcccacatgctcttctgccttgctaaacagcttgccattccagacatatgccattcagtgtcatgactccatgtccctgtacatgttgttcccattgactggaattagcacctgccttctccacctgtcttgcttgccctccaaaacagagccagagtgcccctactggagtccctcctgcacctcccaggccaagctgatggtgggttcacttgagctcttgcagtgtatgtctaagtttacagcatctgtggccactctggctgtttactgataggtttttcctgtgagactgaataggcttggcatctggtttatctttgtatccatagagcccggcatagaatgctgacttgatttcaagtctagtgttttgtatagtgcacccttccttatcctctggaaagtgccccctaccatcttggcgattgtcactgtcagttaagaacccaggcccaagccagatcttatcatttgggcagccgttggcatagctgcgactcgaatgactagataggttgggcatgttaggcagctttggtcacctgacactcaaagatttcagtttgacggttgggggtagtactggccggcttgtttttcatttgtcaagacgattgctgcccaagttcacaagcaaatgccactcaggttcttttgtgtgtgctgtgttgatttagtctcaccccctgctctgcatttttcgattactagcattgtcacatcccttacctcattgtacccacccaaaggggaatccctttggtattattatttgtttgtttgttttagaggtggtcttgctctgttgcccgggctggagtacagtgcatgatcatagctcactacagcattgaacttgtgggctcaagcgatcctcctgcctcaggttcctgggtagctaggaccataagcacgagccaccatgcccagctactctttttatttttttttgtagagacagggtcttcctatgctgcccaggctgactttggtgtttctgagatatgaaataaatgctcagttggggtgatttttatttcaaaggcatcctttatcagtgaaaatattatctgtctataaatatacataatatatgtttgcctctgtatttctggaaggatatacataaaactattagtagtcattgctttagtatttcttattttaagtgaaactccctagtcagtatttttagacactttttattatatccctttcttaattgttcataattgttattcctaagcttttacaatttatttaacaaaaaaaattgtagacacaatttctgtttaatgaacttaaaatctaaaataaacacagaaattggctgggcacagtggctcacacctataattccagcactttgggaggccgaggcaggtggatcacctgaggtcaggggttcaagaccagcctggccaacatggtgaaaacccacctctactaaaaatacaaaaattagatgggtgtggtggtgggtgccgctagtctcaactgcttaggaggctgaggcaggagaatcacttgaacccaggaggcggaggttgcagtgagctgagattgtgccactattgccctccagcctgggcaacagagcaagactctgtctcaaaaaaaaaaaagaacatacagaaattacatagtcccataaacaaatcttaaaactttctactttgtgtatcactaattttatatggttgccttaaagtaatgcgtaagtttcttttttctttttctttttttttttttttgagacagagtttcactcttgttgcccaggctggagtgtagtggcgtgatctcggcccactacaccctgcacctcccgggttcaagcgattctcctgcctcagcctcctgagtagctgggattacaggcatgcgccaccatgcctggctaattttatatttttagtagagacggggtttctgcatgttggtcagtctggtttcccgacctcaggtgatccacccgcctccttggcctcccaaagtgctgggattacaagcatgagccactgtgcccagcccatgatattattaaacagatatccctaaatgtagtgtacgtaaaacacttcaaactaattgacaaaatgtgctttcatttttattggaatatggctgggtgtggtggttcacgcctataatcccaggactttgggaagctgaggcaggcaggtcacttgagctcagaaattcaagaccaacctgggcagcatggtgaaaccctgtctctacaaaaaaatacaaaaattagttggatgtggtgctgggcacctgtagtcccagctacttgggaggggttgagacaggaggatagcttgaacccgggaggtcgaggctacagtgagccaagatcacgccactgcactccagcctgagtgacaaagtgagaccctgtctcaaagaaaaaaaaaatacagaagagaaaagcacaatatagacattatatggagaaagctgtgtgtctttcccctctatccctttaaaccattttctcagggaaaccaccattaatgctttcttaatttttaggaatttttatatatagtaaacacaaattggaagcatcttcaacttacatctgcaaatgccacttaatactatatgtttttatctttcaagaaaaattgcatttactggtattgttattttgcttgtttaaagtgagtttgcttctttttaatctttgaaggatgtgaaaacgtgcttttatatttctttataattatttatagagcacattttatttttaatttattttattttattttattattattactttttttgagattgagtcttgctgtgtagcccaggctggagtgcagtggcacgacttggctcactgcaatctccacctcctgggttcaagcgattctcctacctcagcctcctgagtagctgggatcacaggcgtgtgccaccacacccagctatttttttttttttttgtagtgttagtagagacaagatttcaccatgttggccaggctggtcttgaactcctgacctcaggtgatccacctgcctcggcctcccagagagctgggatttagaagcgtgagccaccactcccggccaatatatttgtatttgtaagttcacatcattcaaaaatctttatatctggtttctacctatttgagacaatatcctatgaattggtttttaaattaaaagaacatcatattggggagaagattgctctgtaatgtttgttcaagaaagcagcaaactaggctgagtgcggcagctcacccttgcaatctcagcactctgggaggctgaggctggcggatcacttaaggccaggaattcgagaccaacctggccaacatgatgaaaccctgtccctactaaaaatacaaagattagccggatgtggtggcatgcacctgtagtcccagatagtcaggaggctgaggtgggagaattgctggaacctgggaggcagaggttgcagtgagccgagattgcactactgcactccagcaagtgcaatgagaccctgcctcaaaaataaataaataaagcagcaaactgattttttaagcaaaaaaaaaaaagaaagaaagaaagaaaaaggctgccagtatcatgtgaaatttagagccctacttctaaaataccgttgctgcataagaataggaatttctattattgtagtatgaaatccatgtgttcatttcatgaagtactggggaatttgctctcatgagagtttttcttgtcccttgtttaaattcctggtccccctttttaatacctggagttgctctttcttttcctcttaatgtttacctggtggtatctgggtgcttaagcaagtctaccaagcagattagaaatactattgtagaaggctgggcgcagtggctcacgcctgtaatcccagcactttgggaggccgaggcaggcggatcatgaggtcaggagatcgagaccatcctggctaacacggtgaaaccccatctctactaaaaatacaaaaaattagccgggtgtggcggcgggcgcctgtagtctcagctactcaggagggtgaggcaggagaatggcgtgaacctgggaggcggagcttgcagtgagccaagatcatgccgctgtactccagcctgggcaacagagcgcgactctgtcttaaaaaaaaaaaaaaaaaaaagaaatactgttgtagaaaatcatctagtgtttctaaagagatccccaagaagaggttcacactggcccatcagcatctggacttttatgtccagaagcactaagattctggacatttatgctggccctttggaatcccagtacattactgatctaggaaaaggcagaaaagatctatgtgtaggtcagttggagagcaaaagtagctgggcatggtggctcatgctcgaaatctcaacacttcaggaggccaaggcaggaggatcgcttgaggccaggagttcaaggccagcctgggcaacctggcaaaacccattctctatagaaaatacaaaaattaaccaggcatggtggtgtgcatatgttgtcccagctaatctggaggctgaggtgggggaatcgtttgagctctgggggtcaaggctgcagtgagccgtgatcacaccagtgcactccagcctgggcaacagagtaagaccctgtctcaaaaataaaaagagaacaaaagtataaagggtatgctgtgatagacctggccagaggtaagatcaccaattataaaagggattgtgcagaaagaaggggcaggaattcagaaggctacccttctgtatgattccatacatacgatgttctagaaaaggcaaaactgagggacaaggaacacagcagtggttgctagagatggggaraggggttgattataaaaggattaacttcaaggggtgaagaagctgttgtgatgctggttacattactttaggcatttgtcaaaactcagtactgtctgccaaaaaagtacattttattgtacatagatgtgaaaaaccaagaagatgagggaaacgctgtttgtcatttgatcatggttacataaagttcagaagagggctgagcgcagtggctcacacctataatcccagcactttgggaggccgaggtgggcagatcacttgaggtcaggggttgaagaccagcctggctaacatggcaaaaccctgtttctactaaaaatacaaaaattagccgtgcacggtggcacaccatgtagtcccagctactcaggaggctgaggcrggagaatcgcttgaacctgggaggtggaggttgcagtcagctgaaatggtgccactgcactccagcctggcaacagagcgagattctctcaaaaaagtgtgtgtgtgtgtgtgtgtgtgtgtgtgtgtagaaattgttcagatagttcagaaggttatacaatgaaaagaaaaaacctttactcccaccccaggcccagtcatgttccccagatgtcatcaccctttaacagctcactctgtatgtgtatatatagtgctgttctgtgccggcttttttacagaatttatcttggagatgtcagcacatcagtgcacataaatctacctcattctttttatcgagtgcatattttctgacggggagtatttcctaatttacgtgaccagtctgcattaatggctattcaaatggcctatgccaggagataactggaaacaagacagcaatgaatatttgtatgcattcaactttgtgcacctgtctaaatatagctggccgtaggacataaccgcaagtgtcattattgggctgaagtcatacacagtttccattttgatatggatgatgccacactgccctcttgggaggtcaacaaatttgtattcctattagctggcatatgggagttcaacatgcacatagatatttgtgaagtagggccaattgcagtggcttacacctataatcccagcactttgagaggctgaagtgggagcattgcttgaggccaggagtttgagaacaacttgggcaacatagcaagaccccatctctacaaaaaatttaaaaaaattaaccatgcaagatgaygtatgcctctagtcccagcttctcaggaggctgaggtgggacgatcacttgagcccaggaatttgaggctacagtgaactacagtgagctatcgcaccaccacacaccagcctgggtgacagggcaagacccagtctcaaaaaaagaaagaaaaaatccatgagtaaagtatagtttgtgacttgagtcaaatttatcctcactttctgaaagcattcacaatagaaatttaattatgagatgaaaattagcaaattatgtgttaataaagttggtattctgaggtttgtgggggcagttaaaaaatttttgatttttaaagttaatttttacaaatcttgattttttttttggccaggctcggtagctcctgcctgtaatcctagcactttgggaggctgaggcaggtggattgcctgagctcaggagttcatgaccagcctgggcaacacagtgaaaccccrtctctactaaaatacraaaaattagctgggtgtggtggtgtgtgtctgtaatcccagttaccctagagggtgaggcaggagaatcgcttgaacctgggaggcggaggttgcagtgagcccagatcgtgccactgcactccagcttgggcgatagagcgagactccatctaaaaaaaaatttttttttgatttttaagttacttgaggggtaaattttttttaaagaaagaatgtatttcattttccttgtatttttaaaatatttttattgtggtaaaacatatatacataaaatttgccatttaaaccatcttaagtgcataattcagtggcattacttatattcacattgttgtacaatcatcaccactatctgtttccaaatcaaataatattttttaaattgtggcaaaatgtacgtaatgtaaaattcaccattttaaccattttaagcatacagttcagtggcattaagtagattcacattttggggaaacatcactaccattcatcttgagaatttcttcatcttccyaaactgaaactccttaccccaacctcccctttcctcacctcctggcaacctccgttctgctttctgtctctgtgggtttatctactctaggtatccatgtatattttttctgtgtcaaaaattgctttgaaaaacacatagtgcaaattgcaaagataaatgtgggctctcttataggagtgccacacattttacatttttctttgcttctgcttcttggagtgcatgctgttgtcatggaaagcaggcattctttggtagcccaggttctggaacggtgcctagaatagctgctcactgtgtttgccagattaactgatggatatatgaaaacagtatactgcgtgacaacacctttgttattccataggacatggacatcttccagcaacagatctcgagaagacagctggctaaaatccttatttgtccggaaagttgatccaagaaaagatgcccactccaatctcctagccaaaaaggaaacaagcaatctatacaaattacagtgtgagtgacaggtttgctatcttcatagttgactttttttcccctttgttcctaagtttatcgttgaattttcttttgtttcagttcacaatgttaaaccggaatgcctagaagcatacaacaaaatttggtgtgtataccaaactatcctttacttggggaaaaataatgactttatttgttagttaattccactaacacttgatagcatagagagagatctttcatccctctcttttgaagctgaacattcagaggctcttaaactgagcttcatgtgggattgccgaaggcgttttgattttaagcactcacacagctaaatcatcatataggctatcagactttagaatgttaccagactcttgtgtttggaggaactttgccaggctgtctagtccatctacttatccagtgctggagtcctttccacagaccttcctgactgcctgtcctgaagtaagttccatctctggacagctctgagtgttaggaataagaattcacatctctgagtccttcattgattcccctaagtaaaactgccctgtgagagtcctgtatgtatttgaacatagctgccatttcttcccaactcctctgttctccaggatccaagtcccttccgctgattctcctatgatttgcgatctaaacctgcttacagaatttgtaaactttaagacgaaaggggagarctaagcttaccagcttttaagttaacagaaatagtattttaatgacccatggtgagcaaatgtgaagaaaaaggtttttagtttwgttttgtttttacctttaatatctactacgttcttaagaaagcaaacaattttgtccctataatcagcatactttttagaagaaaaaccttttgttttttattgttttgtttttgaagatagcttatgaaatgtaacaatagcattgaatttcttgctcattccagcacatttctctttattaaaaaatgcccttaaaacaaagcagatgtttatttctaagtcttttctcataaaaatggaatttttccctatgccgatgttgtcctggattaccttttttgtcctgtcttatcacttcgtctcctgtctcgggtttctggctgtctgttcctatttctatttgatgttgtgctctcacttcacacccagcatgtagaatcaccttgctcttccaacttccctgtctgtgccactcaccttgttttactcagcccgttccttagttctctgtggtgaatctgtcacctaagccgtgcattcttcatcggacatgtattttggttctcttgtttccttctccatctctctctccaagcctctcgagccccattcccaagtagctttttttctgactacctttctgggctccaagctatacctgtgtctccttcctgccctgcaatacattaccccaaagtttgtcagattgatctgcttgagttctgttttcttttttcatcacgttttttcttttctctgaaactttcagcagctccctgtttgcagaacataaagacttaactcctgcctggtttttaggggtcccaataatgggattctgcccaacccatccagttctgggtacaagtactgcctgccttacaatctccattcaggtaaggccagggctcctaagagcaggtttggggtccccagcaaagaggagtggctacaaatccatgcgtgactttgtgttggtgaaaaacctgggccccgttgccaggcccctttctggaccccacctgaatcatgtgtactgggcttcctcctgggcactgcctccaatgcagggttgtctattcctgctcatgtcatgcgacgaaaaggaaatgttggacatacatttccctagcagaatccctctttccytgtcctcgattttcattgatcccatgttatttctgaacattcatgagtcacgcatcagatacatttaatatcagatcctaatttaaaaagtaaatgctactcttccaaaagtacacatgatgtggtcactatactgggtcataaagatgtatgggttttcagttagttagacttagaccgttttggaacttttctctgttaaccatttatgtatccctggtcgtatggagctccagtggtgcagtcggttagcacatggtacttacatacccttggtcctgtagccccagcatctggtggtgatcactagctaaatatcagagtcagcaaatagtgtgaacaggttccatttcttgcccttgatccccttttgcatccattgttgaatctgtatgatactttttcatcataatttttctattcaaaaagtgtgcaggttttagcttttctcttggtgtaaaacagttacactcttccctttgcctttccctgtacattagaatctataccataggaaagcttccatggaaccaagctccactctgacacccctgttaaattcatacactgccgtgacctgtcatggctttgtccctgtccctgcacaatgcgcgggaatgaattggttggtgtgttcggtgcgagactacgtgacacccctcccatccccttggcccattgaattgagtagaacataatttatgcttcgcattgtatctttaatttttattcttctgccatgttgatgcccttggggagtattggaggttggagtcgcttccagactatgttgtgttccagctgtcttcttgctccttcctgaaggccagcttgttctctgctcctgttacctctgcctgctggtactgcttgtgttgtctgcctctgtcttgaacattactttyctccctttccatcttccttatttcttctgtgttcttttctactattccccgtctctcattcttctgtctttggaaccaacagaatgttttttggtgatgtcgttttttttcccctcaaatggaaaatagtagacccatagctcccaaaatcctgggacctttggtttttctttatcatcattatactgattgaacaactcttctagatagttggggtatcagaaacctaagcttctgatcagcagggtgttggaatacaacataattcagctaaaaggttarctccacatgccgttttatcatgatgttctaaggtcagttgttagaacacagagtaggtggtctttttcctgttactgatcaggtgctgtccacctggycaaattttgctggttgtttaattagtgttgctgtttcttctctttaagtcaagaggtgttgccaaagattcacgaagataaacactacccttgtactttggtggggacttggaacacgtggtatggcgagcaggaccaagctggtaggaagcgaagtctttggaataaacacttcttccttaagccttatgtaacacttaagtaattttctaatttaatgcttgttcttatcatcaaagctttccaagtctcagtctaattttatgattaaagtagtttcttcaacaattcattgcgaaaatggttttaaaattgtttttaatgtttgaatctattattgaaccattatgatgtaactcataggccaaaacatggggcattacagtttttttgttttttgagacagagtcttgctctgttgcccaggctggagtgcagtgatgagtatctaggctcactgcgacctctgcctcccgggtttaagcgattcttctgctttagcctcccaagtagctggaaatacaggtgcccaccaccacacccaggtaatttttgtatttttagtagagacagggtttcaccatgttggccaggctggtctggaactcctgacctcaagtgatccgcctgtctcagcctcccaaagtgctgggattacaggcatgagccaccacacacccagcctacagttttgtgctgtgttaacgttatacctatctagaacattttcaagtagtagtatcatgaaattctaaacgtatactgtcttttaaaatgcatttcagtccacctctggaggtatgaaggaggctatccagccctcacagaagtcatgaataaactcagagaaaataaggtaatgatattgaaaaatgtttacttagactaatgatatatagatgttagtacagaattaaatgacttttctgtcttcagtttttgttaataaacttcatttttttgtaacagaaattttattgtttggactcctgaagttgtatttaaacataaacagttgtaatactattcaaacaacaattctgaccgggcgcggtggctcacgcctgtaatcccagcactttgggaggccaaggcaggcggatcacaaggtcaggagattgagaccatcctggcttacacagtgaaacactgtctctactaaaaaaaatacaaaaaaattagcygggcttggtggcaggcacctgtagtcccagctactcgggaggctgaagcaggagaatggcgtgaayccgggaggtggagcttgcagtgagctgagattgcgccactgtactccagcctgggcgacagagcaagactctgtctcaaaaaaaaaaaaaaaattcttattgttcttattataaaagtcaattatgctttgaaactgataaggtggtactttgaaacyggtgactgggctgggtgcggtaactcatgcttgtaatcccagcactttgggaggccaaggcaggcatatcagttgaggccaggagtttgagaccagcgtggccaacatggcaaaacctcatctctactaaaaatacaaaaattagccgagcatggtggtgcacaactgtaatcccagccactcgggaggctgaggcacgagaattgcttgaacccagaaggcagaggttgcagtgtgccgagactacaccgctgcactacagcctgggcagcagagtgagactctgcctcaaaaaaacaacacaaaaaaaacccccaaaagactggtgactggtgtatcaatcagcatggcaggcacaattagctctggatgacctaaaactgtctaattcaggaactgtttgtcacacacatagagtttatcttgggctgactttgctttccaccctcccttcactagcaggtgtttgtcaatagggagaaatttaaaagccacacatcattaagaaagaaattcttttgtatagattcccagacaaatataaataggttttgaattatctgctcttttgtagtctgcatgctacttctattgatgtgccatcaaacactgttagaagaatctaaaaatatagcaaattaaatttgtttgcattgccacctaaataattaggatgaccaagtaatttgtcatctaaacctggacacttttgagaatgaaaaggaatgctgttaatgattatgcaagctcaacagatgtaaactgggactgtctcaggccaactgggacctgttgattaccctattatagtattctgtaggaacatcaatgttactgaaatgggcttatatgtaagtatcagaagatttcatgagcacayttttttcactcaaaggaatttttggaatttcgtaaggcaagaagtgacatgcttctctccaggaagaatcagctcctgttggagttcagtttctggaatgagcctgtgccaagatccggacctaatatatatgaactcaggtcttaccaactccgagtaagtacagaaatataagttattccttttactcctctgtgaaaaagcacaagcattttgtaaggctgacaacagaacttgtgtgtacattctgtgatgtatgtctagcattatatgtatatatatgtatatatatgtatttttttaagactgggtctcacactgtcaccaaggctaagctcttttgctttttatggccttacacataatgcttattatttgatatttttctaaataacatatttgtttttaagaagaaagacctaaagtgcaggataaggtacaatatgtaacatctgttgtggttaaaggagagcagctaataaacactgtgactgttgaacaaattatataacatgataagagtaaaaggcaataatataacactttctagaaattttcctactgaggactagaaagaaagccccacatagcagcattattaaagtggctaatgcctgtaatcccagcactttgggaggccaaggttggaggattgcttgagccaggaagcttgagaccagcctgaacaacatagtgagaccctgtctctattaaattaaaaastaaagttttggctgggtgtggtggctcatgcctgtaatcccagctttttgggaagtcaaggcaggtgggtgacctgaggtcaggagtttragaccagcttggccaacatggtgaaaccccatctcttactaaaaatataaaaaattagccaggcatggtggcgggcgccggtaatcccagctactcaggaggctgaggcaggagaattgcttgaacccaggaggcggaggtttcaggagctgagattgagccactgcactccagcctgggtgacggagcaagattctgtctcaaaaaaaaaaaaaaaaaaggttttttgaagttagttttgtcacttaatgttttttctactgctgtttgctatttctgtattttttttttcacagaagaactaacaaaccaaatctaaatctgttttcagccaggaaccatgattgaatggggcaattactggtgagtatattactgaatggtgattttttaagtcttgtgaatagattagtttaggccatagtgttaattctagggaaaaaaatctgaggatagtactgtgacttaacactgcactaatgtttcgtttgatgtttttattatgagatttttcaaacatacaaaactagagagaataatggggctccccttccacatccatctcttagcttcaataattaacacatggccaatcttgtttaggcctaactccttcaacccagattgtttggaattaaatcccagacagcattctatttcattcataaatatttcagtactatatatatttctaaaagataagcaccttttttttaaaagcaaaaccaatattgcataaggttagtttacatacttcttggatatcatcttttctgaaacgttacttttgtcatatatacacaccatgtcaataatggtttcttctttttttccttgctagtttgagtagaaaaataacaatttttccacaagttgatatgtagattcagcagaatccctatcaaactctcagcaggctttagaagtgcaaaagactagccaggtgcactgtggctcatgcctgtaatcccagcactttgggaagccaaggcaggagaatcactcaagtccaggagttcaagaccagcctgggcaacatagtaagacccccaacctctaccaaaataaataaataaataaaactagccaggtgtgatgccacatgcctgaggtcccaggtatttgagaggctgagtaagagaattgcttaagcccagaagatggagtttgcagtgagccaagattgcrccactgyactccagcctgggcaasagagtgagaccctgtctcaaaaaaaaaaaaaaaaaaaagtccgggcatgttggctcacacctgtaatctcaacacattgggaggctgaggtgggcagatcacctgaagttaggagttcgagaccagcctcgctaacatggcaaaaccccatctctactgaaaatataaagattagccragcgtggtggtgcactcctgtaatcccagctacttgggaggctgaggcaggagaattgcttgaacccaggaggcagaggttgcagtgagctgagatcacaccactgtgctctagcctaggtgacagagtgagactccttttcaaaaaaataaaataaaaataaaaataaagactgggcatgatggctcatgcctgtaattccagcactttggggaggctgaaggaggagaattgcttcagcccagacgtttgagactttgagaccagcctgggcaacatgacgaaaccccaactctacaaaaaaatacaaaaattaaccgggcatggtggcacacacttgtagtcccagctcctcgggaggctgaggtgggaggatcacctgagccttaaaggtggaggctgcagtgagccatgattgtactactattcagcctgggagagaataagaccctgtctcaaaaaaataaaaaattagggcggggatggtggctcacacctgttatcccagcactttgggaggccaaggtgggaagatcacttgaggtcaggagattgagaccagcctgaccaacttggtgaaaccctrtctctactaaaaatacaaaaattagccacgtatggcggtgtgcacctgtagttccagctactyaggaggctgaggcaggagaatcacttgaacctgggagacagaggttgtagtgagccaagatcaccccattgcactatagcctgggtgacagcagactgtttcaaaacaaaacaaaaaattgccttactttcagtgatactaaaaaaaaaaatttaattaaaaagacaagtcatatactggaataaaatatttgcaaatcatatgtctgataagcaaattgaattcagaatagataaataattcttacaactcaataataagaatacagataactcaattaaaaaatgggtaaagaatttgaaaagacagcagctgggtgtggtggctcwcacccgtaatcctagcactttgggaggccaaggcaggaggatcgcttgatgctaggagttggtgaccagcctgggcaacatggtgaaaccctgtctctataaaaaaaaaaaaaaaaaaaaaaaaaaacttgccaggcgtggtggtggcacatgcctgtagtctcagctattcaggaggctgaggtgggaggattgcttgascctggggaggtggagactgcagtgagccatgatcatgccactgcactcccagtgagaccctgtctcacaaaaataaaaaataaattgaaaatggaattagtgtgattcagcagtcccacttctggatatatatccaacagaattcaaagcagatctcaaaaagattcgcatacccatgtttatcatagctttatttgcagtagccaagaggtagaaacaacccacatatccatcaatagataaatggataaagaaattgtgggctgggtgcggtggctcacacctgtaatcccagcactttgggaggccaaggcaggctggtcacccgagctcaggagtttgagaccagcctggccaacatggcaaaaccccgtctctactaaaaatacaaaaattagctgggcgtggtagcgtgcacctgtagccccagctactcagcaggctgaggcaggagaatcacttgaacccgggaggtggaggttgcagtgagctgagatcrcgccactgcmctccagcctggcaacagagcgagacttcatcccccgcctcyaaaaaagaaggaagtcttgtcttatactgcaatatggtgaacattgaggaggatgtaatgctaagtgaaataagaggacaaatagtgtatcattctccttatgtgaagtatccagtgttgccaaaatcatagaaacagaaagtggaaaggtggttgccgggagctgggcagagagggaatacggaattggtgtttattgagtatagagtttcagttttacaaaatgaaaatgttttggagatctgtggcataacagtgtaaatatactggacactgcataaaaatgggtaagatggtaaattcaatgttaacgtgttttttttaccacaataaaaaatacgtttaaaaaatgtttaggccaggtgcagtggctcacagctactttgggaggctaaggtgggcagatcacctgagatcaggagtttgagaccagcctgggcaacatggtgaaaccccrtctctacaaaaaatacaaaaattaaccaggtgtggtagcacatgcctgtaatctcagctgcttgggaggctgaggcacgagaatcacttgaacctggaaggcagaggttgcagtgagctgagattgtgccactgcacttcagcctgggctacagaccctgtatcaaaaaaaaaatttttttttaaataaattttaaaactttttaacggacaaaggatttgaataggatttcaccaaagaaaatacatgaatgcccataagcttatggaaagggactcaaccttcttagtcattatggaaatgcaaagtgaaactataatgggataccagttcctgcacactgggacagctgtaacttaaaagagatagataataacgtgttagtgaggtgaggagaaagtggacccttccgatattgctgatgggaatgtaaaatggtgcagccactttggaaatagtctagtagtccctcagaaattacatgtgggctggacgcagtggttcacgcctgtaatcccagcacttaacgaggctgagggcgcggatcacctgaggtcaagaattcgagaccgayctggccaacgtgacaagaccccatctgtgctaaaaataaataccaaaaacgtagccgggcatgttggtgtgcacctgtaatcccagctactcaggaggctgaggcaggagaatcgcttgaacccaggaggtggaggttgcagtgagccaaggtcacgcctctgcactccagcctgggtgacagagcaagactccatctcaaaaaaaagaaaaraaaaattacatatgacccagcaatttcattcctgggtgtctacccaaaagataccatccatataaacacttatatatatgtgtataagtgtttcttatacaagaatctttcctccttggatcatcaaaggctaaataatgcaagttagaaagcaaacatccatgtaaacacttaagtgaccatagcagcatgttttataatagccaacaagtagaaacaacctaaatgcccatcagcagagggtgggattagccagagggccagtttactagccctgctttaaatgataaagctgtccacgtcctcccaggagctaccttaaattcaaaacacaagaaacacaagaagcatgctgattacaattgtaacaaaataccagctttcaccattatgatttaataccgtttttagaaatcctgactattataatatgagaaaagacagagacatacaaagcctcaataggccgggtgctatggctcacacctctaattccaacacttcgggcggctgaggtgggaggatcccttgagcccaggaggtcaagaccagccttggcaacatggtgaaacctcatctctacaaaaaatactaaattagccaggtgcagtggtgcacttgcctgtagtcccagctactctggaggctgagcaggaagatcacttgagcccttgctgttgaggctgcagcaagccatgatcatgccattccactccagcctgggcaacagagcaagatcctgtcccaaaaaagcctcaataattaagagggatgcaagaataaattattgaccattggttagctgaagtcagtgcctaggacaggaaatggaaagaaaaacactagtgacatttagggttctgtgatggtgagattgttggtgttttctttttaccagtctccatacttacttcattatgggatttctttggaagctaaaaatactgcctgggcatggtggctcacgcctgtaatcccagcactttgggaggctgaggcagacagatcacttgaggtcaggagtttgacaccagcctggccaacatggtgaaaccctgtctactaaaaatccaaaaaaaaaaaaaaaaaattagctgggtgtggtggcgagcacctgtagtcccagctactcaggagatggaggctgcagtgagccaaaatggcactactgcactccagcctgggcgacagagtgagactccatctcagaatatatatataattttgaaacattgggatagtttcctaaaataatctgaagcatacatctatatctaattcaacaaaagatttatagcattttttttctttgaaacttaacatatttctgtaccttaatttttgtttcttttctttttttttttttttgagacggagtcttgctctgttgcccaggctggagtgcagtggtgcgaactcggctcactgcaagctccgcctcccaggttcacgccattctcctgcctcagcctcctgagtagctgggactacaggcaccagccatcacacccggctaattttttgtgtgttttttagtagagacggggtttcactgtgttagccaggatggcctcgatctcctgacctcrtgatccgcctgcctcggcctcccgaagtgctgggattacaggcatgagccaccgtgcctagcctgttttttgtttttagggggagatgtgtgtgtttatttctttgaagtaattatgttaactcttacttttctttggcagcttgctatttctgtttcctaagctggcatttcataactatttacccacaaagggggaggccacatggtgctgagaaaaagctctgggtttgagttacttgacagctctcaccttgaaaagagaacttgtacctttttgcctttttttttaacttcaacttatatcttttcttttttctttttcttttttttttttttgagacggagtcttgctctgtygcccaggctggagtgcagtggcgcagtctcggctcactccaatctctgcctcctgggttcaagcgattagcctgcctcagcctcccaagtagttgggattacaggcgtgcaccgccacacctggctaatatgttttgtatttttagtagagacagagtttcgccatgttggccaggctgatctcgaacttctgacttcaagtgatctgcctgcctcagcatcccaaagtgctgggattacaggtgtgagccaccgcgctcggccccagtttttctcttttttcggttatgaratttcctgctgtgcatgaaataatttctaagatcccttctgtctccaacaaatagttctgtgatctttatttctaatgaacctttcctccttagatcatcaaaggctaaataatggaagttagaatttcttttcatttgaaaactaagaaatacatatttggttgtatgctactattatatacaatttttgttcttttgtttttggactattgttgttaatcatgtagctactcacggaataggattactcactagttcaatttttgcccattactgatcaagactcgctcgccgtggaatccacagggacatactggggttattcagttatttaaaaaattatttgaccaggcgcggtggctcacacctgtaatcccagcacattggaaggccaagatgggcagatcacctgaggtcagaagttcgagaccagcctgaccaacatggagaaaccctgtctgtactaaaaataacaaaaattagccaagtgtggtggtgcatgcctgtaatcccagctactcggaaggctgaggcaagagaattacttgaacccatgaggcagaggttgtggcaagccaagatcgcaccattgtactccaccgtgggcaacaagagtgaaactctgtctcaaaaaaaaaaaaaatatatatatatatatatataatttataaagccagtttagcattcaatttatattttggcacataggtaactaagatggtgaccacctcgtctgtacaggcttctgattgttaccaggctaaggcaagtatgttttgtttgcctaccataactaaattacaaaaattcagaatgaaatgaataatctggaatatttatcactatcaatgaaagccaggtttttttcttctgaatagagttagaatgcacattgaagtgatttgcttaatttcaataatcagatttataatttctgtgaagatattgatcacttaattctcaatgtaaagattaaagatgtcatcttatttgtggataatccatgggggcaatagcaagaagtccctttttcaccataaaggaacccaagcgcttgggtaaggttcccatcatggcactgagcccatggtggattagagcagaggtgtagagtgattttaaggagactggattgcttgagcccaggagttcgagaccagcccaagcaacatagcaaggccccatctcaacaacaacaaaaacataataaaaaataaaaaattggctgtgcttagtggtgcaagcctgtagttccagctactcaggaggccggggcaggaggctccctcgagcccaagagttccagactgcagtcagctaagatcatgccactgtactccggcctgggtgacagagtgagtctctgtcttaaaaaaggagattggcttagtcactcacaggaaatcactcttggatttttttcccccttttgagatgttatcattcagtatatatgaagtttgcctccaggaagagaatgctcagccaagccaactcaagcatcttgtgccttgagagtgacatctttcactgtcattgttagtaggttgctatccttgtttatatgctgccagctcttttgaatgaattagagtgaatctgtcttcccaagtcttgtcacctgtgggaccctgatatgactgagacttcaggccagagcctgggcagtgtggtatggatttactgggtaatgcatggtgtgtcatctcctgatagaccttaaccatgtgtcttctggtgacctccctatgtcatttgaagccccttccttttcacctttgattctagaagactgcttttgaaaaaatgggcacattttaaaacatttttaggaattcagatgcatcactaaatattttttttttaagtggtgcaagtatgaaaggaaagggctctgagccaggcgcagtggctcacacctgtaatccaagcacttagggaggctggggtggacagatcacttgaggtcaggagttcaagaccagcctggccaatgtggtgaaatcccrtctctactaaaaatacaaaaattagccaggygtggtggtgcacacctgtaatcccagctacacaggaagctgaggcaggagaatagcttaaacctgggaggcagaggttgcagtgagccgagatcccgccactgcactcctgagtggcagagtaagactccgtctaaaaaaaaaaaagggctgtaggctggcctggtggctcatgcctgtaatcccagcagtttgggaggccgaagcggggcagatcgagaccagcctggccaacatggcgaaacctcatgcctaccaaaaatacaaaaaattagccagacgtggtggtgggcgcctgtaatcccagctactcgggaggttgaggcaggaaaatcgcttgaacccagaaggtggaggttgcagtgagccaagatcgtaccattgcattccagcctgggcaacagcgagactccatctaaaaaaaaaaaaaaaaaagccgagcgtgatgtcatgtgcccataaccccaactactcaggaggctgagacacgagaataacttgaacccaggagatggagattgcagtaagctgagatcacgccgctgcactccagcctgggagacagaggaagactgtttcaaaaaaaattaaagagctgataccttttgcagtgggaaattcttaaagttttaagccaagtgcctatttttaactgatcatagtgtgatgtccacagaggcacaatgtatattagtactttcttccatatttggtacataatgaatgcctttggtactcattttctgaatggtttgctctagtaggaaagaaaaaaaaaaaaagcaagaggcagctttgcctgcactactgaggctgtaccaccagaaagcttcattcccatggttcctctgtatggcatccaagaagttgcagagtcccttgtgtagttcagagagcaggggtgtttctcaggatttcagagtcatcagctgctttgaaggtgtgcttccttcacctgtgttttaacgccctgccccaggggtkgtccctgtctcccttgggtacagtgccctgtggcaccttgggtgctctagttccaggtttgcctcgcttcccctctgagggtgttctggagaagcagtgctttttaaattgacgggtcccatcctctgccagttctagactttatttcaagaatcaccagtgcaactatatatacatcttcaggttgctgtttttatttttaataattattaaatacattttctcaaaaaaattagtatagctacagaaaagtatgcttacatttcatatacattaaaatgacttttagaccaggtgtgrtggctcacgcctataatcccagcactttgggaggctgaggcgggcggattacttgaggtcaggagtttgagacaagcctggccaacatagggaaatcttgtctctactaaaaatacaaaaattagccgagcatggtggcgggtgcctgtaatcccagctactcaggaggttgaggcaggaggatggctcgaacccaggaggtggaggttgcagtgagctgagattgtgycactgcactccagcctgggtgacagaatgagactccgtctcaaataataataaagtaaataaaataacttttgatttgccttagataacttgataccagtttgataaaccattagtcttcattttaaacagcctgccctgagtatggtgaaggtttagtctaccgattctcgttagcgtatctaattcagtgtcttamacaaacatcatctcattcttacagggctcgtgcaatccgcttcagacaggatggtaacgaagccgtcggaggattcttctctcagattgggcagctgtacatggtgcaccatctttggggtatctgtttttcccttttcgagttactgggatttaagagttcattactaagttgtactgggaagtagagcacatcttgagtcagtaaccttaaccactacagcaaatccgacgtcacagagggacagtctgtacggggctgtctggaactagcgaggtcaacagtgaaagtccatagattgatggcattagtgagctgaaagtgagtagggatgatggggaaaggaataaggggtaaagcaagcagccatggaagaaggaggccagggaagtcaagagtgccttccacagagtggtcccagcctttctttgtagactgactgcttacttcctcgacagaggcaggcctgcattttacccagagcagcagcttcctgcacatactcactgcctgcctttgtagacgtggttccactgtctcatgacattgaccccctcaccatttccatccccacacacttttgtttggcaccatctttggtatttttccaggcctgccccagatgtcacccttccccactagtgaacatcatcactcctcctgagcccccagagccttgtgtggtgctggttattaccgttgcggctgtatatggtgtgcaaccctcccaggcatgtgaataagcacaggtgctagaagggcaggattggatggaggaaggttccatccctttggctgttgggcagaggtcaagccaggtgcatgctccattcacatcagcacctgtagctgcccggagagggcctcccagatgcaggatcctggaatggcaaacaggcaggcaccagagtgtgaatggcggagctctcatagaggctgtggggaatgcaggacagacctcttgtctctgccctgtcgggaggactcaaggcttcacagagcaacagcaagttgaagatgattgcttgaggccaggagtttgaggctgcagygagctatgactgtgccactgcactccagtctgggcaaatagagcaagaccctgtctcaaaaaaaaatgtaattaacaagatattggctgggcacagtggttcacgcctataatcccagcactttgggaggccgaggcaggtggatcatctgaggtcaggagttaagagaccagcctgaccaacatggtgaaaccycatctgtactaaaaatacagaaaattaggcatggaggcgcatgcctgtaatcccaggtacacaagatgctgaggcagaagaatcgattgaactcaagaggcggaggttgcagtgagccgagatcgcaccactgcattccaacttgggcaacagagcaagactccgtctcaaaaaaaaaaaaaaaagaaaagaaaccaaggcatctggatgagatacctgtgaattgtaccatgacacaggtgatccccctccacctgaagcgcctttcttcctattcctacgtcagtgatgtccttttcaacttcaacacccacctggtcagcttgcacctttcccacagctctcccattgcttgccctgctcccctatacactgtgtccttgtatgggccacggcactctccacaactgacctcgcctgcctcatatcctggggcttcaccgctggaacacactccctgcccagatcagtgtagtgcgagataaatgttgagtaaaattgatctgacattgctcatctgtggtctcacagtttctggtcatgaatttaacatgttattggagaatttcacttggtttataaaggtatatcttagattcactagattgtaaagcttaagagggaattgtgtctggatgtggtggctcacgcctcgattcccagcagttttggaggctgagtcgggaggatcacttgagtccaggtgtttgagaccagctcgggcaacatagtgagaccccatctcaaacaaacaaacaaataatttttttaacttaagaatgggccaggcgtggtggctcacccctgtaattctagcactttgggagactgaggcgttttgatgatttgagcccaggagtttgacatctgactgggcacaaaaaaatacaaaaattagccaatgtggtagcacattcctgtagtcccagctattcagcaggctgaggtgggaggatcacttgagcctaggaggtcaaggccgtggtgaaacatcatcgtgccattgcgctccaggctggttgacagagtgaccttgtctcagaaaaaaaaaaaaaaaagactgaaagtttgcttttcccacgtggcctaatataattttgctcagaatttccccagcccagtatattacacacctgaagtagtccctgagaaaactagatgtccaggtgaagcaagactttaacggatgtatgggtggaatgcagtgtatgtgttttaagtcttacttctctgtgtggttatttttaagcttacagggatcttcagaccagggaagacatacggaatgcagcatggcacaaacatggctgggaggaattggtatattacacaggtaatctcttaacagccatgaaatatgctttttgtcttactgtttcaatcatgttctttcaccctgacactaataggtgggttttgtaatagtatgttgctaggatagtgagttatcaggttgtggggggaagggagatagtcaatttttctctaatacttacatgactttttttcaataaagtagaatatccatgctttcaaataggtatatcatctgttacagttttcagacccttggatgttgtaaattttacatcattacctgtttttgtagatttctatattctctgaaaacttattacacaaataaaatttttttctaagctttccttttccatcagaattgttagtatcccaaatcagaacttaatacatcaattaaagagtgattttgaaattagataaattaaacttcctgtatgtacagtatgtatctgggtacataatacatgcatgtgcacatacataagtatattatgaaaccctgtttgcttgatttttaaaagaaaacagttggctgaatgtaacccagtggcattggtagaggtaatcagtaccagccatgttgcatggcaagtatatttcaggccgggcgcagtggctcacgcctgtaatcccagmactttgggaggctgaggtgggcagatcacctgaggtcgggagttcgagaccagcctgacgaacatgatgaaacctgtctccatttgagagactgaggcaggagaatcgcttgaacctgggaggtggagattgtgccactgcactccagcctgggtgacagagcaagaatccgtctcaaaaaaaaaaaagtgtatctcagcccctatactaccaagaaaataaaagagtaatttgtcctagaaagtaggtgttaccttgtctttcagttcaagagattatataacatataattacatgttataattatataattgtatttgattttgctgcttacgcgaacgtttgagaaatcaccatttctcctcacagtatggacttttcctacctcccacaaataaaacaaatatccaggtaggatctgtttttttttttttttttttttttttttgagacggagtcttgttctgtcgccaggctggagtgcagtgacgcgatctcggctcactgcaacctccgcctcccggtttcaagcgattctcccgcctcagcctcctgagtagctgggattacaggcaggcgccaccacacccagctaagttttgtatttttamtagagacagggtttcaccctgttggccaggatggtctcgatttcctgacctcgtgatccacctgcctcagcctcccaaagtgctgggattacaggtgatctgcgcccagctgatctgttgtaattttaatagcatcttgtaggatggcagctgatacagggtccgcttrtatatttctgcccttgaggttagtcctgtatattatgatattctcttgttttcaagcagcacatctgtgaacattctcggcaatctgtctgttagtgtcatttaccataatgtgtttagaaagtaacaagtgcagtaaccctgatcttgttttcagttccacttattcaggaaatggaatccagaatcatgatcccactgaagacctcgcccctccagtaaagctgtagagtttctatgtgcctacatacatttctgtgacaagtatttgtcgtaaattaattttaattgtgtatcaagtgaaaaagaaacactgaggttttaagctgctgtatatagcttgtgagaaacctcttttctttaaaatttacataatcacaagaaaggaaagaattacagttggactgattgtgacagtgccttgtcgtcctctttgaaacaccccgtgttgtccagtataccttataacactkagccacttctccccaccctccagaaggggtccacgttgaattctgaatcatcttgaaaataagattccaaccacaaaaaaaatttagccatttctttactaaaaaaamccaaaaaacaaatctgttttataatcacagatttttagacaaatttcttgtatcaggaagaaatacaaattttgtcatgtttctcaagcagtttttctgagtagtttctgaggaggaacaaattacaagtgtacccaataactgaaaatgttttaactcactctcatttgtaagcagtccacatagtagacaatgggttttccaagctgggcaaggtacatttaatcagtaaatcagtttcacatcatgtattgtgatgtttcaatgtgagacacaaaaacaatggcttgaaacttgtgtatcatatgtgattttgaaatgaacaccttgaatagcactaatttttatttgtggtatttttctataacaaaacaagtagctctaggaaaagaggttttattttgtaaacgatcatttgtgacctcagacactctctggctaatattttaataagctcacagcagataattctgagatcatgggtgaggggtggtgcatgttgagatttaaattggcrtaaagctgcatactttttgtctagctgtttgatttcattttttaatatagtatgccaattttgtgactgttaccatgtgaaagtcctgttraaatgaacaattgtctgccccacaatcaagaatgtatgtgtaaagtgtgaataaatctcatatcaaatgtcaaacttttacatgtgaatgattttctcaaagaacatagaaaagtcaataaaatcctcttaatttccacatatcacgtttggattttcttttttaatttgttctgagattgacaaacattgctgtgaatgaccttgtcactcttgcaaaatagcttgtcacaaaagattgaaggaagtgaggaagtcagctggcttctggggaaaatccctccataggaacaaattacgaggccctgggcaaggtcatgcctggtatgtgctgagggcagcagaagccagtggcagaagcagacatgagggagagtgtggtgggacacgagctcagaggtcacagggctggatcccttgagtgttggaggccattagaaagaccctagtggccgggcccagtggctcacaccagtaattccaacactttgggaggccgaggccagaggatcccttgaacgcaggagtttgagaccagcctgggcaacatgaatgaaacctcatctctacaaaaaatcgaaaaattagttgggcatggtagcatgtgcctgtagtcccagctactcaggaggctgaggcaggaggattgcttgagcccaggaggtcgaggctgtaatgagctgtgattgcaccactgcactacagcctgggcaacagagctagatcctgtctcaaaaataataacaaggctgggcacagtggctcacacctgtaatcccagcactttgggaggccaaggcaggaggatcacctgaggtcaggagttcgagatgaacctggccaacatggtgaaaccctgtctctactaaaaacacagaaattagctgggcatgggggtgggcacctgtaatcccagctacttgggaggctgaggcaggagaatcgcttgaacccaggaggtggaggttgcagtgagctgagagcgcaccactgcactccagcctgggtgacagcgagagcccgtctcaaaaaaagtgagactagaggagctcaccaagggagtgactgtagtcagaggagaggatcaagatgaggaggaacctgcaaaagagactaagaaaccaccagggaactcagcagacactcaagcaagtgaggcgtcatgagagccaagtgaaagtccatcagagatcacctctgtcaaatgctgtcaagtggctgggccagatgtggtccccaaactgttcacagttgggtgcagtggctcacacctgtaatcccagcactctgggaggccgaggcgggcgggtcacctgaggtcaggagttcgagagcagcctggccaacatggtgaaaccccatctctacaaataatacaaaaattagcttggcatggaggcatacgcctgtaatcccagctattggggaagctgaggcaagacaatcacttgaacttgggaggcggaggttgcattccagccttggtgacagagcaagacaccatctaggaaaaaaaaaaaaaattcatgaatttagcaacatgatggtcactaagtgacctttgataagggcattctattcttgagctattttatgaaattatcactttattttagcaattcctgctcagtttgacaagtcattttactgaatttctatagcacaatgaatcattattttgtcccactattaattttcttttttcttttttgagacagggtctggctctgtcgccaggctggagtgcagtggaacgatcttgggtcactgcagtctccacctcccaggctaaagccatcctcccacctcagcttcccgaatagctgggaccacaggtgtgcaccaccatgctcagataatttctgtatttttttgtagagacagggttttgtcgtgttgcccaggctggtctcgaactcctgggctcaagttacccacctgggccttccgaagtgctgggattacaggtgtgagccactgtcctcagccacactattacttttcattggcagtattcaaaacttccaaactcattttcaatttattggttataagtctgaggaatattacttataaaagccaactcatttttcgttatcacacgtgaggtttttaagtctgtttcaaaaagcaagtgtgccatattatcagcatccctaccaccttttttgttctttggagacagtgtcactctgtcgcccaggctagagtgcagtggtgcgaccacagctcactgtaaccctaaactcctgggctcaagcaatcctaccacctcagtctcccaaagagctaggactacaggtgtgccactatgcctggctttttaaaattattactgttattttgtagagatggcatctcaccatattgcccaggctagtctcaaattcctcggttcaagcaatcctcccacctcagcctcccaaagcactgagactgcaagcgtgagacaccgcacccagcccttaccacttgttaaaagcctttttagaaccactttgctctcctccaaactagccattgatagaaccgtcttttattttcacaacygcctgtgaaagaccctttttgcagttccccatcataattttgctttagtttgggatctttaggatggagggcatccctccagtgattaggagacacccaagatggaaataaagattttattacttacaggtcctgggggtaaacaccatgcctggaggtcacacacatggagtcagggagcacagacggggagaaaaagagacgcatgggccagtgcctttagtggggtacagagcattgctcaaacagatttccctatgaggagttttaattagtagatttaaagcaagcatggttgggcacagtggttgacacctataatcccagctcttctggaaggccaactcaggaggatctcttgagaccagaagttccagaccagcctgggcgacatagcaagatcctgtctctacaaaaaaaaaaaaaaaaaaaaatcaaaaaatttgccagtgtggtggtacacacctgtggccccagctactcaggagactaaggtaggaggatcgtttgagcccaggaggtggaggctgtgtcacaatctgtggttagtgaggcctaggagagtgcgtgcccccagcctggcctcttaacccttgggatgggagccacatcaaaaatgtgttaatataggccaggtgcagtggctcacacctgtaatcccagaactttgggaggccaaggagggcggatcacctgaggtcaggaagtcgagaccagccaggccaacaaagcaaaaccctgtctctactgaaaatacaaaaattaggtgtggtgacatgcacctgtaaccctagccacttgggattctgaggcaagagaatcgcttgaacctgggaggcagaggttgcagttagccgagatcatgccactacactccagcctgggggacagagtgcgatttcatctcaaaaaaaaaaaagaggaagatttttaactcaatgtccctaggcagtagcctccctctgggacagcccataccacaagataatcagttactttctcgcccttttagtgttctgtaagtaaaatctttagaatggcttgtatttctaggtgactaaaacaatatatatatatattttttcttctttttctttggacgtttacctgacaagcttccgctgatatcaagtagttgttttgttttgtttttgagacagtcttgctttgtcactcaggctggagtgcaatggcgtgacctcagctcactgcagcctcgacctcctaggctcaagtgaccctcccacctcagcctcttgagtagctgcgactacagtgcatgcaccatgcctggctaatttttaaattttctgtagacacagggtttcattatgttgcccaagctggtctccaactcctgggctcaagcaatcctcctgcctgggcctcccaaagtgttgagattacaggcattagccactgcgcttggctgcccattgctttaatgtagggcctttaagatggacagcacccctccagtgattaggagaggcccaagatggaaatagtttatcacttggccaggcacagtggctgatgcctgtcccagcattttgggaggccgaggcaggagaatctcttgagtacaggagttggagaccagcctgggcaatttctgtagaccctgtgtctacaaaaaatttaaaaattagccaggtgtgatggtacctgtgtgatggtacccagctacctgtgaggctgaggcaagaggatcacttgagcctggaatgtcaaggctgcagtgggctgtgttcgtgtcactgtacatcagcctgggtgacaaagtgagagcctgtcaaaaaaccaaaccaaacaaacagtttatcacttaaagatcctagggatacacaacactcctggaggtcatacacaggaggtcagaaagagacttgggggccagtgcctttagtggggtcctgggtgtcacccaagcaggtttcacgtggggattttaactggtgggtttaaagcaagcaagtggccgggtgaggtgactcacgccggcaatcccagcactttgggaggctgaggcagatggatcacctgaggtcaggagtttgaaaccagcctggccagcatggtgaaacccctgtctccactaaaaatacaaaaattagctgggcgtggtggtgggcgcctgtagtcccagcttacttgggaggctgaggtaggaggatcacttgagcctgggagatcaaggctgcagtaagctgagattgcaccactgcaccccagcctgggcaacagagacacaccctgtctcaaaaaacaaacaaaaaataaagcaagcagtcacgagttccaggaggtcttgcagtgactgaatggtggtcactgcagcatatctgcacagtccgtgtcggtgtgagggtcagtggggcctgctgaacaggctgcatgtaactgtcccacgggaaggtggccaccagggggcagttgtgtaaggcagacttctggatccaccacattgagggactgtgggggtcagggagtagaactggaaacagtgtcaagagtgactgagttggcccggtgctgtggcggctcacgcctgtaatctcagcactttgggaggctgaggcaggcggatcacctgagatcaggagttcgagaccagcccagccaatatagtgaaaccccatctctactaaaaatacaaaaattagccggcatggtggtacatgcctgtaatcccagctactcgggaggctgaggcaggagaattgcttgaacctgggaggaggaggttgcagtgagccgagatcacagcactgcactccagcctgggcaacagagcgacaccttgtctcaaaaaaaagaatgactgagccctgcttctggtagtagaaagtccaacttaaatttcaaaaggttgctgatgcaatataaagttataagaattcactacaaatttttattttttttttattttttgagacagggtgtcactctgtcacccaggctggagtgcagtggcaggatcttggctcactgcaacctccacctcccgggttcaagcaattctcctgcctcagcctcccaagtagctgggattacaggtgtgcgccaagcacagctaatttttgtatttttagtagagatggggtttcaccatgttgggcaggctggtcttgaactccaggcctcatttgatctgcttgccttggcctcccaaagtgctgggattatagacttgagcccaccatcatggcctacaaatgtatttctttttcttttttttttttttttgaggtgaagtctcgctctgttgcccaggctggagtgaagtggcgtgatctcagctcaccacaacttccgcctcccaggttcaagcgattctcctgcctcagcctccggagtagctgggactggaggagtgcaccaccacgtctggctaatttttgtatttttagtagaaacgaggtttcactatgttggccaggctggtctcgcactcctgacttcgtgatctgcccacctcggcctcccaaagtgctggggttacaggcatgagccaccgcaccctgctctataaatgtatttcttattaaatttatactttcagtttatttctggggcatcatagatggtcaataat

SEQ ID NO: 94200 - DNA, 70575 bp, Homo sapiens
  misc_feature (1)...(70575): n = A,T,C or G
tacgtggttgactgtcattgctagactgtggctttaccaggggcattgtctttagtgccaagcccagagccacccctagtacctgctgtgtttatagagtgattgagtgtcagggtcagagactagggcaatggcagcagaaacagaggaaagaagtggggcttctaataggtcctgagccagtggcccttgagatgaagacttcttgccaaggtctggggctgtgctgtgtgttctaggcccgagactggaagctaggcctggctgcagccccggctgagctggggaagtgcaggtcagcatcctgcttcattaggacacctccaagcccagcttagacctggatgccaggtgaccctctgtttactctgagcccagacagaggacagggaagtgtgcaagtgtgggaaccctcatcacagcccttgactctgtaaggcatatgggcttgtgcacgtgtgtgagcacggccgtggcttctctgtgagtttcaagctcgaggttgtgtttatgcagggttaggcttgccaggtaaaatacaggaagtccaattaaacctgaatttctcattaaccttttttttttttttttttttttggtgcaaatatatcccatgcaatatttgggacctgcttaccctaaaaaatgatttgttgtttatctgaaattcaagtttaactggcatcctgtcttttcacttgctatgtatgagagttccgtgtgggggttatgagtgtgcatttatgagttcccatgtgaaggactctccaagtgtctgtaggtgccaggatggagatggacagagaagatcctctcgggccactttagtggcacctagagactgtggggtaggacacttcagcccccaggggcctaggcagcactgtccagcacctgtgtgctcctgtcttcttcatagggtctgacttccctgccatctctctccaaatacggtggcaggagctatcccatccgcccccatctggagctcggctgcccagccagacaagatggcaaacagtgtgcagatggctgcaaagctttccccagatccttctgcaaggggactgcagatgaaatggaagccctcatcctcaccgcctcccccttccagaaaacccaggcaacagccacctctgaatgctgcttgggaagcttctccctcctggtgattaaaccaccccaaataaataaagcactgcatttccaccataggcttgttcacatgcacgcagcctattgtcttggatccgcctgtgtgcctgatccatcatgaggggttctcctctgaggtgcttgcaaagagctgcttgcaaagagttgcttaattttcatctgaaagactctgtagaaaccaggcccagctttggaagaaaaccttttctccccctttagcaaattctgtgtcattcttttttctttctttcttttttgagacggagtttcacttttgctgcccaggctggagtgtaatggtgcaatctcggttcactgcagtctctgcctcccagattcaagcgattctcctgcctcagcctcctgagtagctgggactacaggcacccacaaccatacccggctaatttttttgtatttttagtagagagggagtttcaccatgttggccaggctggtctggaactcctgacctcaggtgatccaactcggcctcccaaagtgctgggattacaggcgtgagccaccatgcctggctggaattctgtgtcattctggatacttatcatgacttcaagcatctaggactctgtcctgggtatcctgagcctgagggtgtatgtgtgtccagctggcttggaggttgtctacaggcaggttgaacttggcctctgagtccatggcagcctcacatgggaaataccaccgaggagcctcatcgtgtgcttttaggagatagtttctatttagtcattgctgaatctgttacagagagggtctcgatttcttgcaagtcctgtatgaggtcggtgctgtgattatccacatgttcacttgttctctctggcctctttcaggctcttgaacttcctttgctcttttcctgccacagggcctttgcatatcgggctctttcttcctggaaagattttccctctccctgcctcttcacctggtcacggtctcatctgacagtggagtcactacatcctcagggacgcctggccacactgactcagtcacagcaaccccctgttatctgctttcatgacaccaggtgcctctctgtggtagacactagctcagctacggcttcctgtttctgtgcgtgtcatccttccccttcaagactgtggtcaccgtgagggccagggccatgcctgttcgtgattctcatttgtgtctctggtgtttagtatatgcttacctagaatttgattaatgaatgacggcatacccattttacagatgagaaagttgaggctcaggaacattgtgtaacttgctcagtattagatagtgatggtttgaagcgatctggctggtcgctgggtgcacactcttaaccacttcagtatggttcttctctcatggtagctctccaacagcaggagtgagagacaattttaggacaggtgtagccagaatcccaggggttatcctagaaggtggtgtcaggaccatgcttgcctatgggccttcttactgtattgcataaaatactcagtttttctgacttgcctttagtaaagaccttagcaatatttgaagcacagttgtctgtaggaaagggtgggtgtttatacttttttaaaaaggagtctatatcatatttatcttgtggtctgccatgccccccgctcttcttcagcttcagttatgcaaaattcacacttcttctcttgagtgcctctctcttacctgttcagtttcttttctgtgttcgagattgcttagaatttttccccattactacagcctgcttcccacctgtatcccccagccagcttgttctggattttgtcaacaacagttccagcgtttagtgagggctggactgaaggaaagccttggaaaagcctgtgtgatgaaaggtgagatacctaatgtgcaggcagacatcagggttaattcaaaggctggaagaagggctcacctggaggactggaaatgtctttgagctgaaggtcatgtgcaggtggaacgaagagggtgagccttttggggtgaactgcaagtagttgataagatccctgtccccatgattggggaagtcttgataagcatcctcaatgtgatggagggatcaaagaacccatggctctacctgtctagcatggcagcaacatgacacagccaagttattgattattggttgcccagctgtcatcactcaacatcttctgttagttatagctgtaatttgcactagttgtcaatgccagttttgactttcctagccaataaagtgttccgagagtggcgactaaggctgagcactacccataatcatgagtattacagaggcaagcccccttgcccacccacctgcaggtgatgacacaccctaggaaatcactcagttctttggaggaccctgaaaaaatgctcaagtccatctgttcatctgtccgtccatctatccaccattccatccatccatccatccatccatccatccatccatccatccatgcatccatccatccacccacctacccatctatccacccactcacccatgcatctatccatnnnnnnnnnnnnnnnnnnnnnnnnnnnnnnnnnnnnnnnnnnnnnnnnnnnnnnnnnnnnnnnnnnnnnnnnnnnnnnnnnnnnnnnnnnnnnnnnnnnnnnnnnnnnnnnnnnnnnnnnnnnnnnnnnnnnnnnnnnnnnnnnnnnnnnnnnnnnnnnnnnnnnnnnnnnnnnnnnnnnnnnnnnnnnnnnnnnnnnnnnnnnnnnnnnnnnnnnnnnnnnnnnnnnnnnnnnnnnnnnnnnnnnnnnnnnnnnnnnnnnnnnnnnnnnnnnnnnnnnnnnnnnnnnnnnnnnnnnnnnnnnnnnnnnnnnnnnnnnnnnnnnnnnnnnnnnnnnnnnnnnnnnnnnnnnnnnnnnnnnnnnnnnnnnnnnnnnnnnnnnnnnnnnnnnnnnnnnnnnnnnnnnnnnnnnnnnnnnnnnnnnnnnnnnnnnnnnnnnnnnnnnnnnnnnnnnnnnnnnnnnnnnnnnnnnnnnnnnnnnnnnnnnnnnnnnnnnnnnnnnnnnnnnnnnnnnnnnnnnnnnnnnnnnnnnnnnnnnnnnnnnnnnnnnnnnnnnnnnnnnnnnnnnnnnnnnnnnnnnnnnnnnnnnnnnnnnnnnnnnnctaagttctgcaataggggaagggcagaaagccatggagagggcctggcccaatcctggagcctcagaaaaaagttccccgttgaattgctgttttagctgagacttctgggatgggtagtagttggagatcccagacaggaggtgaccgagttagcaagggaaaaattgggtcctggcacccatggcagagttgagtgatccagtctttctgtctccactggctggaagtccaccagatctgggaatgtccagttgggggagggggctgacaatgatcatgaccttcacctgtcctcacatgtcctctgtgtatctgcaaagcctctgcctcagtctcctcttctggaaagtgggattggaaaccacatctgcttctctcccaggactgctaggaagacaagattagatggcaggtgagagctctttgaaaatgaaaacattctgctatttgaatgcaaagtgttcttctttgtctgtgatgtttcctaatctgtgaaatcatactggacctcgaagctgtctattaaaaaaaaaatagcaaattggctgggcagggtggctcatgcctgtagtcctagcactttgagaggcttagggggttggatcacttgaggccaggagttcgataccagcctggccaatatgtgaaaccccatctctactaaaaatacaaaaattagccaggtgtggtggcgtctgcctgtagtcccagctactcaggaggctgaggcacaagaatcatttgagctcaggaggcagaagttgcagtgagccgagatggcaccaccgcactccagcctgggcgacagagcgaggctctgtctgaaaacagaagaaaaaaaaaaaaaaaaaaaaaaaaagcaaagttaacacttcctccatctctcccctaggggaggcaatttgtcaaagattgttgttggattttacacacagggaaatctaaggaatgtgtggaaaccagaccaggactctcgtctccctgtttacagggtcttaaatgggggagccactttgggttctttccacaagattgctttgtaaaaaaaacaagaagcaaacaaacaaacaaaaaactcaaaaaaacagccctgacctaaatattcacaagggaccttaggcaatatctgcaaacaaaagtgagtgatgagtggaatctgtcatctttacaactaagacagctccagagttgaagcaagtggaaatatctctagagacagagacttgggcgggttttgccagttacaagctaggagaacctgggcaggtttacctctctgagcttctgtgaccttgtaaaataggctgcattgcgctaaacttgcgggaggaatcccagcatcctcctgtgcacaaggctggtttcttcccatccttttccttgttctgcctctctcctcctctccaagagatgaatacatttggacccagtaggggcctatgtttgcaaaagctctcaggtgattctaatgcagccagcctggctctggcagtgagttcttggacacttctagaggcacatttactagtgaggaaggtcactgtgtgctgaaggcatgactcatcttccattcctttcttccatgaagcaaggcgcatgggtcgactgagctgggagagtccacagtgtcagcctcccccacgcttccctccctccttattccttgtgtgctgtactttgtcttgatttcctgtactctgcaccaagccaggagatggtaagatctcaaaaaaatcatttttttgggaaatgggatcaagagggtttttgtttgcttgtttgtttgtttgagacagggtctgttgcccaggctggagtgcagtggcgtgaccttggctcactgcagccttgaccttctgggctcaggtgatcctcccacctcagcctcctgagtagctgggactgcaggtgcacaccaccatgcctgactaatttgtytattttttgtagagatgakgtttcaccatgttgcctaggctggtctcaaactcctgggctcaagcagtcctccatccacctcggcctcccaaagtgctgagattacaggcatgagctgctgtgcctggccaaggttttttattattattattrttaygaaaacttttcrataaacataaaagtagagasacyagtttaatgagctatcatatacccatcacatagatttaaaaactattaacatttgcaatatttactccatttgtttttctgaagtatttacaaaatagtttacagtagttatgtaattgcatcctgatattcaccmctacgtaatttactttccctctaaaaacatgagggcagtttttatatgatcattgtcatacctaatcaaattaccagtaattccttaatatcctctaagatcaastttacattcagatgtcttgtcctcaaaatgtcaattgtgattatttttttctttgagcaaagataataagatctcaagatttaatgacagagattccatgttagccctgatgtctaagctctgtggtccattgtggctttacttgaaagtctaaggctaggcgtggtggctcacatctgtaatcccagcactttgggaggccaaggtaggtggatcatgaggtcaagagatcaagaccatcctgaccaacatggtgaaaccctgtctctattaaaaatacaaaaattagccaggtgtggtggtgggtgcctatagtcccagctactcgggaggctgaggcaggagaatcacttgaacccgggaggcggaagttgcagtgagctgagattgcaccactggacgccagcctgggtggcaagaacgagactctggaaaaaaaaaaaaaaagtctctcactgtggtctcataataaaaggacactccatttcccatctggcccctgctccttaatgttagccccctcctgtggggaggagggggtgcctttcagcgcaggttcaaacattcccagggctggctctgatcccaataaagcccatcgtcatgaatgaatgcttcccttgcaggttattctaagtattgtaaatagtgcacgtggagtgtcctcatgatgcctgggatggtagtgaatatttataggtttcttttagtgcctttttaaaaattattttctatagttccatgtttctacaacccttaggaacatcagaatcatgtgtgtgtgggtgcttattaaataaaccagttcctggagctcactcccagtgactgccagtctgatgattaggggctcagctaggacctaggtttgcraaagctcccagctgatctcatgcagccagcctggctctggctctggctctgggagctgggttgggaactagtctttggtgctattctgctgaaacttcaagttgggctctttgactccgtcttgtattgtcatcacttgtattcaggtctgttcttcccctggattgtaaactccttgatgtctgggtcatctcagctcatgagctgagctttcagtgggtgctcagtggaacagatgctgaatggagtcaggctgtagggaggccagcgtgtgttggtaagtgagagacaaaaatcattttaaaaagaatctttttgcccttcagttgtgtttgccatgagttaatgtgatttactctagtggaagccagtgcagcttaagtggaggtcttgccctgaaatggagccaggttatggatcagcagagctgccaaaagcgttttgggggaaatgtttctgtgtcaccctcagttgattgaactcaagttttcactcccgtttaacaccacgtgggggccattctgacttctgcggagtgggtatgatcagatcttctgtaaaagtgtaagtgagggggctgggcacggtggctcacacctgtaatcttagcacttgggaggctgagatgggtggatcacttgaggccgagagtttgagacaagcctgcaacgacatgatgaaacctcatctctactaaaaatacaaaaattagccaggcatgatggtgcatgcctgtaattccagctactcaggaggccgaggcaggagaatcacttgaacctgggaggtggaggttgcagtgagctgaggttgcaccactgcacagcattccagcctgggtgacagagcgagactctgtctcaaaaaaaaaaaaaaaaaaaaaaaagtgtatgtgaggaaactggaattgagcttggggatgttgggggatggaggtacttcatttactgaacaacaaaaaccataggataccaatgctggaggaagaagcatcatcctcagtttctactaactcaaccacgcatgagatggggacttggtgtccgagagaaaagcttctttttaggtcttcaatcttgatcaaaccatttctgaattcctcatacacatataatcaggtgctatgagtggtactgattggataatctttctgtcatttcctgtgctaggaaggaaaatacatgtacagccaacttccttgagggttcgttcttttgcatcagggtgtctcaaactgctgcccttaaaacacctgtaagagaatcatccaggcggcttgctcactctgcatgcaggccctttagaatgagagtcagaatccctggggctggagccacaaaatgaaatgacatttcaacgagtttgtcatcatgtgagagagaataggtgagtatttggatacctataatacaaagtagattcaaaaagaatgacttgattattttaaatgttgtgttttaaaaaatttaatacagaaaaggcggggcgcggtgactcatgcctgtaatcttagcactttgggaggccaaggcgggtggatcatttgaggtcaggagttcaagaccagcctggccaacaagatgaaaccccatctctactaaaaatataaaaattagccaggcagtagtggtgcgtgcctgtaatcccagctacgggggaggctgaggcaggagaattgcttaagcctgggaggcagagatttggtgagctgagatcgtaccactgcactccaatgtgggtgacgattgtttaaccaccaccaaaatgggttctgagtccaactattaatatgaagatgacatccattgtggtcttgtacattttgttgcctttccggggtgaaggacattggtgaccatttgtttcctctggagcggtcgattggtcatraacttcctggtccaggtagttactgtgtcattcatgatggtggttgatcctcaggtagttagggaggaaaataaacaagaagttatatatttaaaatcacgtttcaattttagacctgattaattgacttaataaagggcattarcayttctacttcctacagtccctccctttagctctggaaactagttatttctaggttgttttatgttgttaaggttgaccaccttctctttctgttctgcaatcatagtcctatcactagccttttgtcatggtcattcaattcacaagttgcttattttttaatttcttggctgactaaattttattatgaagacttttttttaaagagctcaaaaatactgtattctttaagttcttcagcttgtgatagtgtcttttgcctattttaattgggcaataatttagctggctataaagttcttggattatactctatttcccttagaaattataggcacccatccacagacatttcattgtgcttttttttttttttgagatggagtcttgctctgtcacccaggtttgagtgcagtggtgcgatctcggctcactgcaagctctgcctcctcggttcacaccattctccttcctcagcctcccgagtagctgggactacaggcgcccgcctccatgcctggctaacttttttgtatttttagtagagatggggtttcaccgtgttagtcaggatggtctcgatctcctgacctcatgatccaccggccttgggctcccaaagtgctgggattacaggtgtgagccactgtatgagcccagcctcattgtgctttgtactaaccccctttccctggcctcttccggcttgtcttctctcccagtagtttcttcatgaagaggccatgtgctatattccatgagatatttcacactcaaagaagacttcttttatactcttttgataatttgtcggggaatcactgtcttgatttataagggagtttgtaataaatacagtaaaagagaaacacaacatattttgagacatcagagaaggaagacaccaattctattaatatttggggttagcagggaaggcttagttaagaggtaacatttgaactaagccttgaaataagggaaggatttggccacgcagtaatggtgagagagtagaagcaagacatgatggttagtgttatgtatcaatttgactgggttgtggggtgcccagatatttggttacacattattctgggtgtgtctctgaggtattctggatgaggataacccttaattggtagactgaataaagcagattgtcctccccaatgtgggtgagcctcatccaatccactgaaggcctgaacaaaacaaaaaggtagagtcacagagaatttgctctttttacctgattatatttgagctgggatatcaatcttctcctgactttagatgtggactcgagttggaactatatcattggctgtcctgggtctccagcttgctggctgcagactccaggactccttagcctccataaccatgtgagccatctcttacaacaaatcaatctgtctctctctatgtgtatagctctacctctatctctctgctctttctctggagaacctagaataatacacaaggttatattagagaagaggatgacccaaggaaaagcatggaggcagaaaactgcaaagagggtttgggaagactggggtcctgatggggagtttggatttcactgtgtgtagcatggagaatccttgaaaatattcaagaggtgaaaattgtatttgtggaagaacaccaggagtatgtgaaaagataaccactcactccattttagctccactgaagggggcatcaactggatgcactggggacatgggttggagggtagttgaggccatatctggaggatctttacttctaggctgagtctgaagttatctttctggggagtgggagattacaaatctttgagctccactcaagagatggttttgctaacaatggcagggcgacggtggtggtggtggtggtggtggtgggaaactggtagcatgaattctaactgggcttctgttattctagccgagaaaattggggaatggactttcagtagaataatacagatctgggaatcaactgcatggaggaggtagttataggtgatgagatgtctcagggacaaagtttggtagaaggagaaaagatactaggctagtacaaaaataattgctgtttttgccattacttttaatggcaaaatcggcagttacttttgcaccaacctaagaggatgcaaacttcatagccatctgcatcagagggattgatgaagatcaacaaagtttaggaacacaggaaaggagcggggagggtaatgacttgagggcatagcagggataatcaaggtttttcttgttagcatgtggagacttaagcatgattatatgttaaacacctggcacatatacggtgcaaaatatttatgagtgaaatgacaagtgaaggtggtgagtcatgggagttccaagggaacggatgataaaggcaggtctcaaatgaggcacaagtggagaaggtagcttggaaaaggagaaggatgcttctccttataacatgggaaaggcagaggaagagggtcaagatacagtgatctaggggtgagatggaagtgagttgagagaactcaactctgggctctgaaacccctagggatgggtgttgggggctttgagatatggaagaggtttaaagtcaattgttatagcaaatatggtttggaatttatttgtgatacttaaaaatattgctgaacagaagtgaagtctaccctagagttggatggtgagattatttagtggaactaccagatccatgttgtgattccttccagtatcattcagcagcccttgggcagttgcgaggcaagtcatcaatggggtatggagattttccaggtgggtgtggttgaagaaagggaagaacaagtttaggagcacattacaagaagaaggtgactgtaaggtccaggctgagcaggaaggtaaagcaagaaggaaacatgaggttgtgaagagaagtttagagggatgaggaggcaggagagrtgarcagttgcatgatgtagctagagtggcgatgttagatcttggggccagagatctttacaatgattatgaagatcaaagggcattagaatcaagctataaagagccactgtttgatgttgggatgtgaggatgctgcaggtggatgtctgcacattgatggtgagaacatggtcatcctggccctgctgggtctttgctaaagagactgtgctctgttcttggggccgttttcatcatctgattagagcagtggtccccaaatggtgttctttggaccatctgtataaaatgttcataggtcaaggataaaatggaaaaacagagaaaatgtcacagaaatgtgcctattgttgaaagaccaccagctgtcgtttttggaggattgttctttattctaaaaatgtatatattctattctattaaaacatttttgtatttgcatttttttctcttttatgaaatgccatggggtagaaatttgtaatgtatccaattctcctgtcttcatgcattgccctgtggtgggggaggggatgtggctagtactggccaagaggctgggggcagaggtgcaatgttagacttctagcctggagcatttaattcttagtacaagactctctagcattcttctccctctgttccctgcttggtgatactcgaggtattgcaacccccattaaccttagtcttagggcaagtttgatgggaaacagagcaccccacacctccctgcagatgtagcatgagtgagaaaaacaacttctgatgtttgaagttaccaagatttaggagttgtttgttattgcagcaaaacctcacctattctgaccaatcatggtggaatttctctctctctgtgtgtgtgtgtgtgtgtgtgtgtgtgtgtgtgaaactggtagtttaaaaaagttccttcttacccaaaagaaaaaaagatagcaaccttatgtttgttctcaaattaaaaaaatatttttactcgtttataaaatagaaaaatctgagaatctgtagcttagagaactacagtgtgggatgtctataaagaccaggttattttatcagctcctaacaccccttaatagaagcttagccaagacttgcactacttcagtctttcccattccacattccatggactcttgaagagacattgattaaacggtgcagccatgaaccaccctaactcaatcctagtggcagaaccccccttttactgcagaatgagcttcttgctacagtgatactgcaaccccttagatatatcctgtactaattatattaaaacacgaccaatgcttttgctttgttgtcccccaaattaaacacattaatcatgagaacccagagaattggatttagtgtaactgattccaaactgtcagtaagaacataattaagttatatttttctccaattcaagtaaaagaaaattgacaataaaatgctgatcaatatgtgtagctcacgaggtagagcctgctttgagatgcagaagtgtttgttttttttagatctatattcttgagtaaagaaaaagtccatctctctttcctagaggggaagactttcagagctgggcttggcaacagcctgactatcagaggctgaattaaacaaataggtacctccctggagtgaatggtgygtttctcctgttcggggaaccgtgcttttatggtggagtttgtgttctgtcttggtctccggatgtgtgtatctgtgggtggatgtctgcatgtaaatggcagtgtatacctgtgtaggtgtgtacaaaattcccatgtgaatctcagctttgtggggatctccggttcttgagcccagtagatgccatttgaagaaaaaaatcacttgaaaatgagacagaaagaatggaaactaaatcctagctctaaaggcaccaggctgattaaaaaaaaaaaaaaaaactctggatcttctttgttttggactctacctacctctaaatgacatttctgtttcctatgagatgattagaatgaaaaagatcctgagcacgaaagagcagatactgtgtgatagtgtgtatgtcagggtgtcagctgtgacactgctgacattttggctcagcaatttctctgttctatgtgtgggggttccctgtgcattttaggatgttgagcgtcatccctggatccctgcactcactggatgcagtaacacaactccccccaagtagacacaacccccagtgtctccagatattgcctaatgtccccagggggcaaaatagccccatctgagaactgctgctttcataaagtacaatgtcaggtgaaataggtggaggctgtttgtagtcaggggttagtagagatggaagagaccccaggaatatcctggaagggtctgtaatattttgtttcttgaattgggtgtcagcaatatggagatgttcagttttttgttgttgttgttgttgttgttttgaggcaggatctttctctgtcacccaggctggagcacagtggcaccatcatggctcactgcagcctctgcctcctgggctccagcagtcctcccacctcagccctcccgagtagctgggactacaggcatgtgccaccactgttgcctaattttttatttatttatttttggtagagaggagtgtctcactatgttgcccaggctggtctcaagctcctgggctcaagcaatctgctcatctcggcctcccaaaatgctgggatgacaggcatgagccactgcgtctggccagtatgttcagtttgtaagaaaagtactgtgttgacctcttctatgtgcacatttctttaagtaataattcaataaagcatttagaaaaattggtcgtaataggagtgatttgtagagtgattggcatgaaagctgatcaccttaatttgaactactctgaaatgagcaccaggggccaccaagaggaccctttcaaggtgtcatagccaaggagaggagtgtgttgtttacatctctgcataaaggatttgctggttacatggaaggatgaagcctccttctgaggacagaggcagcaaagcaagtggaagcccaaagcattgagctttccaaattgactttgctgaaatcttgtggatgactcatgctcttaacatacacccatgtacatattgtccatatacacattaattctgtaacaaggcccacacttaagggttttttttttcttttgagacagtcttgctttattgcccaggctagagtacagtggcataatagtgactcactgcaacctccacctcctgggttcaagcaatgcttgtgcctcagccacctgagtagctgggactacaggtgcacaacatcatgtctggctaatttttgtatttttagtagagacggggtttcaccatgttggccaggctggtctcaaactcctggcctcaagtgatctgcccacctcagcctcctaaagtgttgggattacaggtgtgagccactgcgcctgggcccacacataaggtttgagttgagatagagaaactctggcaggactgaggaattgggccacagtctgtgggaaatatgcacaatttctggaatcttctatacttccagagttctcactctctgtctcctgtttattcaacaaacttgtatggaaccacagtgtgtctagaacttgccaggtgtggaggataaaaagatgactgagatcgggcatggtggctcatgcctgtaatgccagcactttgggaggccaaggcaggcggatcacttgagggcaggagtttgagcacagcctggccaacatgatgaaacgtctctactaaaaatacaaaaattagccaggcatggtggcatgcacatgtagtcccatctacttgggaagctgaggcaggagaatcgcttgaacccaggaggcagatgttgcagtgagctgagatcacatcgctgcattccagcctgggagacagagcgagattccatgtcaaaaaaaaagatgactgagatacagactccctcagagttgactctaacacaaattaggtaagagcccaaggtctggctgggccagcaccttgatcggcctcatcctgcagcgtctactagaatgaagaacacttttttctttacccatgaaaatgttttgtgcttcatacccacaagtgcaatttgtgttaattctgcaaaatttgccatataactgtgcctgtattcttagcatttttcctttgagagatttctcagcatatcatctttggactacgtggaattggaaatttacttagagtcaacaacaagtacaggaaagtcagttcttaagagttaggttttcaaagacagtggataaaataaaaaatctagtacagtcaagattatacgtgcaaatcccctcatcattcataaagtttagcagtcagtcttaccgtggctcaccaggtccaatccatacttcttcctccacgattggagcagagggtgattttttttctgagcaactgatgaagtcatttagagaccatttgcagtaggagccatgtgtactagagaccaatcaatgtgccctcatggcagcatttctgcctctctccctctttgttcttgccaagtacccacagttcattttccatagattgaaagagcccaagttgggcctatatctaggagtacaattgctgggtcatttggcaactctatgtagaattgtttgggaagttgttaaactgtttctcacagtggctacaccattttaattcctaccagcagtgtatgaaggttctaatttctctgcatcctcaccaaaacttgttattttctgttttttttttttttttttttttttttagacaaagtcttgctccatcacccaggctggagtgcagtggcacaatctcagctcactgcaacctctgcctccagattcaagttactctcctgcctcagcctcccgagtagctgggattataggcacctgccaccatgcctggctaatttttgtatttttttagtacagacagggtttcaccatgttggccaggctggtctcacactcctggcctcaggtgatccacctgcctcggtctcccaaagtgctgggattacaggcttgagccactgcaccaggccaattttctctatcttcgattctagccatgcttatgggtatgaagtggtatctcattgtggttttgatttctgtttccctgatgatgaatttcattgagcatcttttcatgtgcttattggccacttgtatgtcttccttggagatgcgcaatattttcatattcaaaaatgaaagcacaggtccacacaaaattttgtacatgaataattacagtagcatcactcctaataacccaaagagagagttaatccaaatgcccatcaccagatgaagagatacacctattgttgtctacccacatggtggaatattatttgatcacaaaaaggaggaaagtacatacgctacagcgtggatgaaccttcaaaacagatgaaagatcacattctacatgatttcattcagatggaagtctatagaaataggaagtcgattagtggttgcttagggctggtaggggcatgggaggatgggggtgttagctaaagcgtatgaggtttctttttgaggtcatgaaatgttctaaaattgactggtaatgtttgtgtacatctctgaatatattaaaaaccattgaaatgtaaaaaatgcaaagaaaagcagcccaagttgcaattttattcaacacttgattggctttaaaaatagattccaggctgggcatggtggcttacacctgaaatcccagtgctttgggaggctgtggtgggaggatttcttgaggccaggagttccaggccagccttggcaacatggcaagaccctgtgtgtacaaaaaaagaaaaaataaataacagctgggtgcagtggctcacatctgtaatcgcagcactttgggaggctgaggcgggcagatcacctgacatcaggagtttaagagcagcttggccaacatcgtgaaatcccgtctctaccaaaaatataaaatttagccttttggtactccgagcagcaccatggcagttgttaagaacaagtgccttatgaaaggtggcaaaaagggagttaagaagaaagtagttggtccattctctaagaaagatcagtatgatgtgaaagcacctcctatgttcaatataagaaatattggaaagacttggtcgccaggacccaaggaacccaaattgcatctgatggtctcaagggtcttgtgtttgaagtgagtcttgctgacttgcagaatgatgaagttgcatttagaaaattcaagctgattactgaagatgttcaggacaaaaactgcctgactaacttctatggcatggatcttacctgtgacaaaatatgttccatggttgaaaaatgttcaacaatgattgaagctcatgttgatgtcaagactaccgatggttacttctttcatctgttttgtgttggttttactaaaaaacacaacaatcagatactgaagacctcttatgctcagcaccatcagtctgccaaatccagaagaagatgatgggaatcatgacctgagagatgcagacaaatgacttgaaagaagtggtcaataaattgattccagacaacattggaaaagatatagaaaaggcttgccaatttatcctctccatgatgtcttcattagaaaagtaaaaatgctggagaaccctggatttgaaaggcatggagcttcgtggtgaaggtagtagttctggaaaacccactagggacgagayacatgctaaagttgaatgagctgatggatatgaaccaccagtccaagaatctgtttaaagttcagacttaaaacagtascaaataagaagtcctatttgtgaaaaacaaacaagaaacaacaatgaaagagcaaaattagcctggtgtggtggtgyatgcctgtaatcctagctactcaggaggctgaggcatgagaatcacttgaacgcgggagacagaggttgcagtgagccaagattgcaccattgcactccagcctgggcaacagagtgagactctctccaaaaagaagaaaaaaaaaagtatccgcgcttggtggcatgcgcctgtagtctcagctactctgaaggctgagatgggaggatggattgaggccaggagtaatttgaggctgcagtgaactatgattgtgacactgcactccagcctggactgcaatgacagctgaaaatgacaggatttcattcttttttatggctgaatactattctattgtgtgtatattcccattttctttatccattcatccattgattgacacttagattgattccatatcttggctattgtaaatagtgctgcagtaaatatgggggtacagatatcccgttgatacactgatatctttttttggatatatacccaggagtgggattgctgcatcatatggtagatctgttcttagttttttgagaaatctctgtactttttttcataatggctgtactaatttacattcccaccaacaatatacaataattttcttttcttcacatgcttgccagcatttgttgtgctttgtctttttaatacccattctaacaagtgtgtgatgatatctcattgtggttttgatttgcatttccgtgatgattagtgatgttgaatattttttcataaacttggtgatttgtatattttcttttgagaaatgtctgtttattttttgatagtttcttttgytgtgcagaagctctttcatttaattagatcccatttgtcaatttttgcttttgtggcaattgcgtttggcatcttcaccatgaactctttgcccatcactacgtaccggatggtattgcctaggttgtcttcagcgtttttatagttatgggttttacatttaagtctgtaggccatcttgagttaatttttgtgtatggtgtaagggaggggtgttgtcttttcactctgttgattgttttctttgatacgcagaaggtatttagtttaatataatcccatttgtctgtttttgttgcttgtacttttaagtgttagcgatacaatctttgttctcaagagtttctcctgtgtttatttctagtagttttatagttgtggctgttacatttaagtctttaattgattttgagtttatttttgtaagtgatgagagataagggtctagttttattcttctctgtttggatatctagttttcctggcaccatttaatgaagagggtggggtgtcctttattcaatgtatgttcttgacagctttcttgaaaatcagttagctgtaaatatgtggattcatttctggattctttagtctgtttcctttgtttttgtgtctgttttaataccaatacacgctgttttggttactatagctttgcagtatatatatatatatatatatatatatatgtgtgtgtgtgtgtgtgtgtgtcaaacacccaaacacccctcattatcccacccaccaacctaccaccttaccaactaaccccctccaaataccaatatatctccaacacatcctctattagcttcgactccctcaacactttccccttccctaccccaccccacccccctccctcactcacacaacgagagccacatcaaccacactcaaaacccccaccccacccccacacccatcatatcgcctacaacaaaacccccactcacctcacccctccaccctcaccccaacaacccaccacttacaatcaataatattactcccctaccaaattaccaccgccgacaaccttcctcactaaacctcttccacaacaccaaacacaaccaacattttcacctgaccactctaattcaaaaccacagcatcgccccaccccccccccacccccgaccaagtcccacaacccaccccccccacacaccataccccacnnnnnnnnnnnnnnnnnnnnnnnnnnnnnnnnnnnnnnnnnnnnnnnnnnnnnnnnnnnnnnnnnnnnnnnnnnnnnnnnnnnnnnnnnnnnnnnnnnnnnnnnnnnnnnnnnnnnnnnnnnnnnnnnnnnnnnnnnnnnnnnnnnnnnnnnnnnnnnnnnnnnnnnnnnnnnnnnnnnnnnnnnnnnnnnnnnnnnnnnnnnnnnnnnnnnnnnnnnnnnnnnnnnnnnnnnnnnnnnnnnnnnnnnnnnnnnnnnnnnnnnnnnnnnnnnnnnnnnnnnnnnnnnnnnnnnnnnnnnnnnnnnnnnnnnnnnnnnnnnnnnnnnnnnnnnnnnnnnnnnnnnnnnnnnnnnnnnnnnnnnnnnnnnnnnnnnnnnnnnnnnnnnnnnnnnnnnnnnnnnnnnnnnnnnnnnnnnnnnnnnnnnnnnnnnnnnnnnnnnnnnnnnnnnnnnnnnnnnnnnnnnnnnnnnnnnnnnnnnnnnnnnnnnnnnnnnnnnnnnnnnnnnnnnnnnnnnnnnnnnnnnnnnnnnnnnnnnnnnnnnnnnnnnnnnnnnnnnnnnnnnnnnnnnnnnnnnnnnnnnnnnnnnnnnnnnnnnnnnnnnnnnnnnnnnnnnnnnnnnnnnnnnnnnnnnnnnnnnnnnnnnnnnnnnnnnnnnnnnnnnnnnnnnnnnnnnnnnnnnnnnnnnnnnnnnnnnnnnnnnnnnnnnnnnnnnnnnnnnnnnnnnnnnnnnnnnnnnnnnnnnnnnnnnnnnnnnnnnnnnnnnnnnnnnnnnnnnnnnnnnnnnnnnnnnnnnnnnnnnnnnnnnnnnnnnnnnnnnnnnnnnnnnnnnnnnnnnnnnnnnnnnnnnnnnnnnnnnnnnnnnnnnnnnnnnnnnnnnnnnnnnnnnnnnnnnnnnnnnnnnnnnnnnnnnnnnnnnnnnnnnnnnnnnnnnnnnnnnnnnnnnnnnnnnnnnnnnnnnnnnnnnnnnnnnnnnnnnnnnnnnnnnnnnnnnnnnnnnnnnnnnnnnnnnnnnnnnnnnnnnnnnnnnnnnnnnnnnnnnnnnnnnnnnnnnnnnnnnnnnnnnnnnnnnnnnnnnnnnnnnnnnnnnnnnnnnnnnnnnnnnnnnnnnnnnnnnnnnnnnnnnnnnnnnnnnnnnnnnnnnnnnnnnnnnnnnnnnnnnnnnnnnnnnnnnnnnnnnnnnnnnnnnnnnnnnnnnnnnnnnnnnnnnnnnnnnnnnnnnnnnnnnnnnnnnnnnnnnnnnnnnnnnnnnnnnnnnnnnnnnnnnnnnnnnnnnnnnnnnnnnnnnnnnnnnnnnnnnnnnnnnnnnnnnnnnnnnnnnnnnnnnnnnnnnnnnnnnnnnnnnnnnnnnnnnnnnnnnnnnnnnnnnnnnnnnnnnnnnnnnnnnnnnnnnnnnnnnnnnnnnnnnnnnnnnnnnnnnnnnnnnnnnnnnnnnnnnnnnnnnnnnnnnnnnnnnnnnnnnnnnnnnnnnnnnnnnnnnnnnnnnnnnnnnnnnnnnnnnnnnnnnnnnnnnnnnnnnnnnnnnnnnnnnnnnnnnnnnnnnnnnnnnnnnnnnnnnnnnnnnnnnnnnnnnnnnnnnnnnnnnnnnnnnnnnnnnnnnnnnnnnnnnnnnnnnnnnnnnnnnnnnnnnnnnnnnnnnnnnnnnnnnnnnnnnnnnnnnnnnnnnnnnnnnnnnnnnnnnnnnnnnnnnnnnnnnnnnnnnnnnnnnnnnnnnnnnnnnnnnnnnnnnnnnnnnnnnnnnnnnnnnnnnnnnnnnnnnnnnnnnnnnnnnnnnnnnnnnnnnnnnnnnnnnnnnnnnnnnnnnnnnnnnnnnnnnnnnnnnnnnnnnnnnnnnnnnnnnnnnnnnnnnnnnnnnnnnnnnnnnnnnnnnnnnnnnnnnnnnnnnnnnnnnnnnnnnnnnnnnnnnnnnnnnnnnnnnnnnnnnnnnnnnnnnnnnnnnnnnnnnnnnnnnnnnnnnnnnnnnnnnnnnnnnnnnnnnnnnnnnnnnnnnnnnnnnnnnnnnnnnnnnnnnnnnnnnnnnnnnnnnnnnnnnnnnnnnnnnnnnnnnnnnnnnnnnnnnnnnnnnnnnnnnnnnnnnnnnnnnnnnnnnnnnnnnnnnnnnnnnnnnnnnnnnnnnnnnnnnnnnnnnnnnnnnnnnnnnnnnnnnnnnnnnnnnnnnnnnnnnnnnnnnnnnnnnnnnnnnnnnnnnnnnnnnnnnnnnnnnnnnnnnnnnnnnnnnnnnnnnnnnnnnnnnnnnnnnnnnnnnnnnnnnnnnnnnnnnnnnnnnnnnnnnnnnnnnnnnnnnnnnnnnnnnnnnnnnnnnnnnnnnnnnnnnnnnnnnnnnnnnnnnnnnnnnnnnnnnnnnnnnnnnnnnnnnnnnnnnnnnnnnnnnnnnnnnnnnnnnnnnnnnnnnnnnnnnnnnnnnnnnnnnnnnnnnnnnnnnnnnnnnnnnnnnnnnnnnnnnnnnnnnnnnnnnnnnnnnnnnnnnnnnnnnnnnnnnnnnnnnnnnnnnnnnnnnnnnnnnnnnnnnnnnnnnnnnnnnnnnnnnnnnnnnnnnnnnnnnnnnnnnnnnnnnnnnnnnnnnnnnnnnnnnnnnnnnnnnnnnnnnnnnnnnnnnnnnnnnnnnnnnnnnnnnnnnnnnnnnnnnnnnnnnnnnnnnnnnnnnnnnnnnnnnnnnnnnnnnnnnnnnnnnnnnnnnnnnnnnnnnnnnnnnnnnnnnnnnnnnnnnnnnnnnnnnnnnnnnnnnnnnnnnnnnnnnnnnnnnnnnnnnnnnnnnnnnnnnnnnnnnnnnnnnnnnnnnnnnnnnnnnnnnnnnnnnnnnnnnnnnnnnnnnnnnnnnnnnnnnnnnnnnnnnnnnnnnnnnnnnnnnnnnnnnnnnnnnnnnnnnnnnnnnnnnnnnnnnnnnnnnnnnnnnnnnnnnnnnnnnnnnnnnnnnnnnnnnnnnnnnnnnnnnnnnnnnnnnnnnnnnnnnnnnnnnnnnnnnnnnnnnnnnnnnnnnnnnnnnnnnnnnnnnnnnnnnnnnnnnnnnnnnnnnnnnnnnnnnnnnnnnnnnnnnnnnnnnnnnnnnnnnnnnnnnnnnnnnnnnnnnnnnnnnnnnnnnnnnnnnnnnnnnnnnnnnnnnnnnnnnnnnnnnnnnnnnnnnnnnnnnnnnnnnnnnnnnnnnnnnnnnnnnnnnnnnnnnnnnnnnnnnnnnnnnnnnnnnnnnnnnnnnnnnnnnnnnnnnnnnnnnnnnnnnnnnnnnnnnnnnnnnnnnnnnnnnnnnnnnnnnnnnnnnnnnnnnnnnnnnnnnnnnnnnnnnnnnnnnnnnnnnnnnnnnnnnnnnnnnnnnnnnnnnnnnnnnnnnnnnnnnnnnnnnnnnnnnnnnnnnnnnnnnnnnnnnnnnnnnnnnnnnnnnnnnnnnnnnnnnnnnnnnnnnnnnnnnnnnnnnnnnnnnnnnnnnnnnnnnnnnnnnnnnnnnnnnnnnnnnnnnnnnnnnnnnnnnnnnnnnnnnnnnnnnnnnnnnnnnnnnnnnnnnnnnnnnnnnnnnnnnnnnnnnnnnnnnnnnnnnnnnnnnnnnnnnnnnnnnnnnnnnnnnnnnnnnnnnnnnnnnnnnnnnnnnnnnnnnnnnnnnnnnnnnnnnnnnnnnnnnnnnnnnnnnnnnnnnnnnnnnnnnnnnnnnnnnnnnnnnnnnnnnnnnnnnnnnnnnnnnnnnnnnnnnnnnnnnnnnnnnnnnnnnnnnnnnnnnnnnnnnnnnnnnnnnnnnnnnnnnnnnnnnnnnnnnnnnnnnnnnnnnnnnnnnnnnnnnnnnnnnnnnnnnnnnnnnnnnnnnnnnnnnnnnnnnnnnnnnnnnnnnnnnnnnnnnnnnnnnnnnnnnnnnnnnnnnnnnnnnnnnnnnnnnnnnnnnnnnnnnnnnnnnnnnnnnnnnnnnnnnnnnnnnnnnnnnnnnnnnnnnnnnnnnnnnnnnnnnnnnnnnnnnnnnnnnnnnnnnnnnnnnnnnnnnnnnnnnnnnnnnnnnnnnnnnnnnnnnnnnnnnnnnnnnnnnnnnnnnnnnnnnnnnnnnnnnnnnnnnnnnnnnnnnnnnnnnnnnnnnnnnnnnnnnnnnnnnnnnnnnnnnnnnnnnnnnnnnnnnnnnnnnnnnnnnnnnnnnnnnnnnnnnnnnnnnnnnnnnnnnnnnnnnnnnnnnnnnnnnnnnnnnnnnnnnnnnnnnnnnnnnnnnnnnnnnnnnnnnnnnnnnnnnnnnnnnnnnnnnnnnnnnnnnnnnnnnnnnnnnnnnnnnnnnnnnnnnnnnnnnnnnnnnnnnnnnnnnnnnnnnnnnnnnnnnnnnnnnnnnnnnnnnnnnnnnnnnnnnnnnnnnnnnnnnnnnnnnnnnnnnnnnnnnnnnnnnnnnnnnnnnnnnnnnnnnnnnnnnnnnnnnnnnnnnnnnnnnnnnnnnnnnnnnnnnnnnnnnnnnnnnnnnnnnnnnnnnnnnnnnnnnnnnnnnnnnnnnnnnnnnnnnnnnnnnnnnnnnnnnnnnnnnnnnnnnnnnnnnnnnnnnnnnnnnnnnnnnnnnnnnnnnnnnnnnnnnnnnnnnnnnnnnnnnnnnnnnnnnnnnnnnnnnnnnnnnnnnnnnnnnnnnnnnnnnnnnnnnnnnnnnnnnnnnnnnnnnnnnnnnnnnnnnnnnnnnnnnnnnnnnnnnnnnnnnnnnnnnnnnnnnnnnnnnnnnnnnnnnnnnnnnnnnnnnnnnnnnnnnnnnnnnnnnnnnnnnnnnnnnnnnnnnnnnnnnnnnnnnnnnnnnnnnnnnnnnnnnnnnnnnnnnnnnnnnnnnnnnnnnnnnnnnnnnnnnnnnnnnnnnnnnnnnnnnnnnnnnnnnnnnnnnnnnnnnnnnnnnnnnnnnnnnnnnnnnnnnnnnnnnnnnnnnnnnnnnnnnnnnnnnnnnnnnnnnnnnnnnnnnnnnnnnnnnnnnnnnnnnnnnnnnnnnnnnnnnnnnnnnnnnnnnnnnnnnnnnnnnnnnnnnnnnnnnnnnnnnnnnnnnnnnnnnnnnnnnnnnnnnnnnnnnnnnnnnnnnnnnnnnnnnnnnnnnnnnnnnnnnnnnnnnnnnnnnnnnnnnnnnnnnnnnnnnnnnnnnnnnnnnnnnnnnnnnnnnnnnnnnnnnnnnnnnnnnnnnnnnnnnnnnnnnnnnnnnnnnnnnnnnnnnnnnnnnnnnnnnnnnnnnnnnnnnnnnnnnnnnnnnnnnnnnnnnnnnnnnnnnnnnnnnnnnnnnnnnnnnnnnnnnnnnnnnnnnnnnnnnnnnnnnnnnnnnnnnnnnnnnnnnnnnnnnnnnnnnnnnnnnnnnnnnnnnnnnnnnnnnnnnnnnnnnnnnnnnnnnnnnnnnnnnnnnnnnnnnnnnnnnnnnnnnnnnnnnnnnnnnnnnnnnnnnnnnnnnnnnnnnnttattgtgcttctttggagatgttatgtttcctttttcatatttcttgcatccttatgtgactatctgtgcctctgacataacagtcatttcttccaattttatggattggcttttatatgggaaagaccttttcttatagctgtatctacagtgttcattggatatcacactttggctttgattctgggtgggtacagtggtatagtctgcatatgattccttcagctgtaattggcatgagtggtgcctgtgagtcattcagtggcttagactgcagtgtttttttttgtggttgttgagatggagtctagctctgtcaccaggctggagtgcagtggcacaatctcagctcaccgcaacctctgcctcccgggttcaagcaattctcctgcctcagcctcctgagtagctgggactataggcacgtacaaccatgcgcagctaatttttgtatttttagtagagatggggtttcactatgttggccaggctgctctcgaactcctgacctcgtgatctacccgcctcggcctctcaaagtgctgggattacaggcgtgagccaccacacttggccagactgtagttgttattggaggctgtggtgaggctttgctgaggatggggatgccaggaagtcttgtccttcagcatcagtggtagcggtggtggaccaggtgtgtcaatactagggactgtgggcagtgtttgtgggcactgatgatagcctgtctgcgtgggccaatccctgggcctccaggtggctcctttggttgctggcagtggcagcactgggccaagtgggcaggtgcaccactgggctcctgggtggtgtgcgtggcaggctgatctctagttctccaggtgacatatgcaggttctggtggtgggtaggcaggcatttcctcaggcctctcagtagtaagtgtgagcactagctctggaggcagrtgagtcaatctccaggcccccagatggtacattcaggcaccagcatattcctatgcatttctagataaaagtatttttcagaaaacctgagtgtatgtcctattaatacaactaaccctcatcagctctgcatgagaagaagggggaattccctcagtagaacagtcagaatggaatcacagacttgtttttagccagtcactggtaaggggggttaggctaaaatgataagctcagaatctaaaccttagactagggaatggcaaactttttccataaagatgcaaamggtaatattttaggcttttggtctagataacctctgtygtagtgacacagtggtgccatcgtagcctaaaagcttatgtagacaatggataaatsaatggacctggttttattccagtaaaacttaatttatacagtcagagggccagatttggcccttggtctatagttggccaaccctgtttagagcagtcaaaatttattccctggggctgggccaactttttcttaaaaaaaaaaaaaaaaaagaaagcaacccactgtcagaataaaataaggtttctatttaaaaagaataagaggctgggtgtggtggctcatgcctataatcctagcactttggaagggtgaggcaggaggactgcttgaggccaggagtttgaaaccaacttgggcaatatagtgagaccctctctctgcaaagaataaaaaaattagccaggcatggtggcacatgtctgtagtcttagctacataggaggctgaagggtaagatcacttgagcccaggattttgaggttacagtgagctctgactgtaccatttgtactctagcctaggcaaagagggagaacccaaaaacaaacaaacaaacaaaaggttggttggggcgggttggagaagaaagtatttctgaatttctggataggttactggtagtgtcaggccaaacaagctctacagtcatattcattataaataaaggcaactagaagatctccatctagctattaaaaattggttaaaatctacagagataaaggatggtgacccttgtatcagttagttgttgtcacaaaatgctgcataacaagtcactccaaatctcagtggcttaatacaacaatcgtttattttcatggatctatgggtcagctgaggattggtcaatctagcatgagcatgtctgggaagctcgactttgctcttggtgtctcttatcttctgctggaagcagcagtctggcctgggcttgttctcatggtgatagcaggagtgagcgagcacaattgaatgcacactttccaagtttttggtcatacagattaatattccagtggccaaagctagacacaattcaaaactcaacattagggactggagaaatatactccgattcttcagtgggaggaactgcagagacaaatgacagagtcttggatacagggaggacatgcatccattaatgtaccttaatcaatcgcaaccctctaaccaccaatacaattaagtaagtattggttgaatgcacttgtgcctgaatgcttctggctgcagcccaggcaatgggggcctgactggggagggaccatagcagggactcgatgtcctgcaggtctgcatgtaattgtgcacggccgactccacattggtcatggatgacttgctttatcctgcgtccccaaggggcaacgattggctgattatatttctgaacaattttgacaaagttgttttcaggagcccaggaagcaaatcagttgtagatttgaattttgcagggggtcagaattgttgaatatatatatagacttttacatgctgataattatttccacatcacaaagatggccggctattaggaggctgctgttcaattcctttgccctgtgaactcatgagctgtgtctatgtggggggcactcagttgttagagctgttttccttcataataacatcagccaacgttctaaataaattcaggaaattaaatagtcttccccagacaggtactttgcccttctaaagtgaattacacattctaaaataaaacacagtcacattaaaaaaccaaaaggtctttgtgtcaggttggtctggcttcagcaaagataatattagcctccagagtagaagatccgtggaatccacagtattgcatttggcagccccacgtcttgttttcttttcttttttttttgtttttaactaaaggagttggcaattttattttcacatttccctatacaaatgaaaactgcatcttttttggccccacttctcccctccaaaactattctctttgatagggcaagggggcaagtcttccttatgctgttaagaaaacccgatatcacagcagcatgatctcctggtgaagggagcaggtaaatataaaattcatataggccaggcgcagtggctcacacctgtaatcccagcactttcggaggctgaggcgagcgggtcacgaggtcaggagattgagaccgtcctggccaacatggtgaaaccccgtttctactaaaataaaaaaaaattagccgggcatggtgcacacgcctgtagtcccacactactcaggaggctgaggcaggggaatcrcttgaacccrggaggtggaggtttcagtgagctgagatcatgccactgccctccagcctgggcgacagaggaagacgctgtctcaaaaacaaaacaaaacattacaaacaaaaaaaacacaacagtaacaacaacaaaacaacactgatgcaatgaggcctcccctctatccttatctgtctggttgagtcattctgggctgactgggcaccatcatgagacgggcaggaggtctcatcattgggcacscaggcatcatgggcatgtggcctcccatgggcggcctcattccaggagcaggtcccactggcatcatcccaggaggaggagagcccatcattggcatcatgggcgggccccccatatgggctgctgccatcattctgaaatgtgcgagaagtgtcaaatacacattagattgtgaagacttaatataaaaagaaagcaaagtattttgttattgttaaaatattttatacatgttgacctggtattttggatagatttgtttaaatctgtgatattattccaattacgttcacttcttttgttttactttttaaaatgtggttactacaaaatgcaaaagtaaatatgtggcttgcatcatatttcatcacatttagtgtggaccctgaggatctaggggagttatgagccttaagttgagggtgacccaggtcaatgtgaattgctctgaaagagaagcaaagggcttaaagagaatgtataaatggagagagggagctcagtctcacagggtgaggaaaggctttctttcttacacagtctggcacttcttccaaagattaaacacagagttctatgacccaccacttccactccagtttatgaaagaaatgaaaatatatgtccgtccagaaacttgtacacaaatgctcatagcagcattattcataatagcgccaaagtgaaaacaacacaaatgcttgtctactgatgagtggagaaatagaacatggtttgaytatgcaatggaatattattcagtcatcaaaaggaatgaagtactaacacgtgctacaacacggatgaactatgagaatattaagctaagtggaagaaaccagtcacaaaaggtcacatattctaagatgtcatttatatgaaatgtccagaacacgcaaatctatgaagacagaaaccctgtctctactaaaaatacaaaattagatgggcgtggtgacacatccctgtaatcccagctactcgggaggcaggagaattgcttgaacccgggaggcggaggttgcagtgagccgagattgtgccactgcactccagcctgtgacagagactctatctcaaaaaaagtagattgtcagggcttagtgggaggaggaaatggcaggaaactgctcatggatacagcgtttctttttggggtgatgaaaatgttttaaaattgatcatgatggtggttgccgagctctgtgaatgcactgaaaccattgatttgttcactttaaatgggcaaatcatacggtacctgaattatattttaatagttatattaaaaaagtaaaatcttccttgaagagatgacctaaggagaggcctagggggtgggatgagttcactatgtagagaaatgaggaacagcatttcagggtgagaaacagcgtagtgaagtccctgaggttgataggcatagagcagatttaagggacttttttttggagacggactttcactcttgacgcccaggcttgggtggagtggtgcgaccttggctcacggcaacctctgcctcccgagttcaagcgattttcctgcctcagtctcccgagtagctgggattacaggtgccatccaccacacctggctaattttgggatatttagtagagatggggttccaccatgttgaccaggctgatctcgaactcgtgatctcaggtgatccagccgcctcagcttcccaaagtgctgagattacaggcgtgagccactgcgctcagccagatttaagggactttcaagaagtttgtgtggctgaaggcttcagggcaagcgagagaatcaggaaatgaggctggagaaagagaggggctaggtcatggagggtctcacattagtgtgtggaaacttcacacgagtggtcccaccttgggcattccacctaactactctgtgtcccagcttccccactggtgaaataaagggctgatgtagggatggaatgagatagtgtgtgctcagtaaaggtgaccttttataatttttttttttttttttttttgagatggagtctcactctgtcgcccaggccggagtgcagtggcgcgatctcggctcactgcaagctccacctcccgcgttcacgccattctcctgcctcagtctcccaagtagctgcgactacaggcgcccgccaccacgcccggctaatttttttgtatttttagtagagacggggtttcaacgtgttagggagaatggtctggatctcctaacgtcatgatccgaccgcctcggcctcccaaagtgctgggattacaggcgtgagccaccgcgcccggccgagcttttatcattgttaaccgacacagcagagggagccattgaaagcgagtratcggtttggatgcaccttctgaagtgatcgctttggtccctgtgaagagtgcagattgtcacagggccaggggaagacagaggccagtgaggaggcatttgcagtcaaacagctggaggtgatggtggcttggtttatagtggtgtcaggagagtggctgagcagtgaacggatctgaaaagatttaggaggtaaaacccacgtgacttggtcactgaatgtgggttgggtgggctggagggaaggtaagaaagaatgagaagaaaaacatactcaagtgggccctccagcctaaggttacttgaggtccctttgtgaagaggaatgtttgtgtttatgatgaagatgtctagactttcaaaggccatttgcagtattttttttaacagccaacaaytcctccttccctatgccctagacatatgaattttttttttttgccctaatttatcacagaggaatgaatgtttatttgctttaatgagaaatgcagaatgccaataagaaagcatattaaattaatctggattgctgtgagggagttaaatctgtttagatgtgcaccagtgttactataatagtttggcctaaacccatttctggcctgcggctgcaggaggttgactcccagcttgcttccatttgaaagatcccagcaamaagcacacttggcatttccagccaaacccactttgtgcagcgaaggaaaagttgaggagtgcctctgttgttttcccccaaatcatttggcagaaatgtggctgggagcttcattgctgattttttcagttttaatattgctgtggaaagcctgtaccaacactcagccatgtttttcatccacagctccagtctgggctgtgatttgtttttcctttgagtgacacaaccttattttccattacgactcaatgcaaatagacactcatgcaccaccaccatcactccccctgcttggcggagggaagtcaatggagtgattctagtttggtgttcatatcggtggtatttatttatttatttatttaatctctctctgtaagtcaatggagtgattctagtttggtgttcatatcggtggtatttatttatttatttatttatttatttatttaatctctctctgtctccaggctggagtgcagtgatgcgatctcggctcactgcaacctctgactccctggttcaagcgattctcctgcctcagcctcccgagtagctgggcttacaggcatgtgccaccatgcccggctaattttttgtatttttagtagacacggggtttcaccatgttggccagcatggtcttgatctcctgacctcgtgatccgtcagcctcggcttccgaaagtgctaggattacaggcgtgagccactgcgcctggcctggagttgtttttaaaagcacatttctctcaaattaactccggggtgtcccactgtgacttgggaaaaggttggattttctggagggggaaagtcaaacttcaaatagaatttggaggctgccactgtggctcatgcctgtaatcccagtactttgggaggctgaggtgggtggatcatttaaggccagaagttcgagaccaacctgggcaacaggacgagacctcgtttctactaaaaatataaaaattagccaggcgtggtggtacatgcctgtaatcccagctacttaagaggctgaggcaggtgttatcggttgaacctgggaggcagaggtgtcctgtgtccaaaccccatgaggcgtatcagctggctgaagataaaatcggtcacgctgtgttgggattgkggttgctgttatcatccctcmtccccacccctgctaggcatccacaaacagtcatcttcaatgagacrtycctcctgcccctggctgccttatttcatctgcacccraycdtatccattgcttgtcagtgggtctcaaccttggctgcaccttggaatytcctggggagatgagacrataccaaggctctctctcacttagcgtgatgtttccaaggtccatccacatgtagtaggcaccaatatttycattgtatggatacagcacattttgtttgttcattcatcaaccaaatggccakcttggttgttgctaccttttggttattatatatattacatgattccatttatgtgaaaggcccagartaggcaaatctatagaggcagaaagcaggtaagtggttgccaggagctgggggaaaggggaggggatggagagtgcttgatggatacagggttattttttktgggggcggggggtgttaatgaaaatgttttggaactagacagagatgatgattgcttaacattgtgaatgtatttaatgatactgaagtgtatggtttcatacagggacttgtatgttatgtgaattttgcctcattaaaaaaatactgctaggagcaatggctcatgcctgtaatcccagcactgtgtgaggccaaggtgggcagatcacctgaggctgggagttcgagacctgcctgggcagcatggtgaaaccctatctctattaaaaatacaagaagttagccaggcgtggcggtgcacacctgtaaycccagctacttgggaggctgaggtaggaaaatgggttgaacccgggagrcagaggtagcagtgagctgagatcgcaccactgcacttcagcctgggtgacagaacaagattccatctcaaaacaaaacaaaacaaaacaaaacaaaaacacacacacacacacacaaaaaccaaaaatactgatgcccatgtttcatccccaagrgattctktaataattgatctgggctgcagagcccgggcactggggttttaaaatctccccaggtgattctgatgtgcagctgtgtttgagaatctccttctggaatgaacttgttcatgttttacttctgttgttttctagcctgccaatgtctttctgtttcccttcacatctttggggggtaatttttacaatgcagtcttaacaaccagctgcctcaaaatgcactgggatccctcgtaaccaggtagctccccatctccaattctgacctgccaagtcagaatcttgtgcgtggggcccaggactgtacatattgaaacaggcagtgacctgggaactatttctgaacacccctaggtttcccctgtgttcgccctttcctttcacatttggacccctttgtgtgctgaccactgggctgtttcacatggayrtaacataaaaaagacaggccaggtgcattggcttatgcctgtaatcccagcactttgggaagccgaggtaggcgaatcrcttgaggccaggaattcaagatctgcctggcsaacatgagtaaaccccgtctctaccaaaaatatgaaattagctrggtgtggtgatgcacasctttgatcycagctactcaggaggmygaggctggagaatcccttgagcccaggaggcagagactgcagtgagccgagatcrcaccactacactccagcctgggtgasagtgagactcttaaaaaaaaaaaaaagasagagatgatccttcctttatggagctctcagtaaaacaagaaagctcacgatgtcctggcatttgtcagaaatacatttggtatatgtagctggggtcacatgcttgacwtgcctattgaaagcttctgggtaggaagagaacaatcatcacagcatcacagcctggcataactgtctcccaggacaggtctccctggggagactgagaccacaactctgaaatcagagcttaaatccaggttctacatttcgctcagtaatgtacatgatgtaggacagtttttatattagttatctattgctgtgcaacaatattactgcaaactttgtggcttgagacagcacacagttatcactacgtggtttctgtgggtcaggaatccagcgtgactcagctgggttcagtgcaaggctgcaaccataatgtcagccagggctcagttctcatctggaggcttgactggtgatctgcttcccttctcatctggttgttggcagcattcagttccttgcaggctgctggtctcagggccccaggttcctgctgtcctcagcttccygccacatgggcctctccatctggccactcatgacatggcagctcacatcttcaaagccagcaagatagcctcctagcaagacaacttaacatcctatctaacataatcactacatcccatcacctctgccatattctcttggttataagaaagtcataggtccctttgtcagacgagtagatagcaaaaattttctcccattctgtaggttacctgttcactctgatggtagtttcttttgctgtgcagaagctcttgagtttaattagatcccatttgtcaattttggcttttgttgccattgcttttggtgttttagacatgaagtccttgcccatgcctatgtcctgaatggtattgcctaggttttcttctagggtttttatggttttaggtctaacatttaagtctttaatccatcttgaattgatttttgtataaggtgtaaggaagggatccagtttcagctttctayatatggctagccagttttcccagcaccatttattaaatagggaaccctttccccactgcttgtttttgtcaggtttgtcaaagatcagatagttgtagataatgtggcattatttctgagggctctgttctgttccattggtctatatctctgttttggtaccagtactatgctgttttggttactgtagccttgtagtatagtttgaagtcaggtagcgtgatgcctccagctttgttcttttggcttaggattgacttggcaatgtgggctcttttttggttccatatgaactttaaagtagtttttttccaattccgtgaagaaagtgattggtagcttgatggggatggcattgaatctataaattaccttgggcagtatggccattttcacaatattgattcttcctacccatgagcatggaatgttcttccatttgtttgtatcctcttttatttcgttgagcagtggtttgtagttttccttgaagaagtcctttacatcccttgtaagttggattcctaggtattttattctctttgaagcaattgtgaatgggagttcactcatgatttggctctctgtttgttattggtgtatacgaatgcttgtgatgtttgcgcattgatttttatcctgagactttgctgaattttgctatttttagtagagatggggtttgctgaatgcagccccagtcacgtactcccttcttggtcaatcgatcacgactctctcatgatcacgaccctctyatgtggacccccttagagttgtgagcccttaaaagggacaggaattgctcacttggggagctgggttgttagagacgtgtgccaccactcccagctaatttttgtatttttagtaaagacggggtttccccatgttggttggccaggatagtctcgatctcttgacctcgtgatctgcccaccttggcctcccaaagtgttgggattacaggtgtgagccactccacccagcccagagaaggcttttcatacttgcttggcagcctcctgcatcctacgccakcacctggcgctcacaacctgtgggctgctctcatccgtgatcatctctccccaggcctgctgttccttgagaaaggaagttgtaatgggcagaattctaggacagcccccaagagaaccactcccttatatctgctccctgtatcatctcttcttgagtgtgtgcagagcttgtgatttggccaaggggaaggaattttgcaaatgtgattatggtcacacttgctttgttaagcacatttgctcagctgactttgagttcatccaaagcaggatgatcttaggtgggccagacctaatcaggtgagtcttttaaaggtgaagtttcagagattcaacccttagcctccaaggagacacaaatggccatgctgtgaactgtctttggaggtggcagctctaggagctgagggccttcgttcaacaattgcaagaaattgaattcagtccacaaactgaataagcttggaagaggacactgagcatctgatgagaccccagctgacactctggttgcagtattgtgaccctaaatagaagacccagttaaaccctgcccagacccttggctcatggaaacagataataactggatggtgttttaagctgctcagtttgcactggtaaatccaccaacaggaaagtaatatagaagttaaatgggccaggcatggtggctcatgcctgtaatcccaacactttgggaggctaaggtgggtggatcacaatatcaggagatcgagaccatcctggccaacatggtaaaaccccgtctctactaaaaatacaaaaattagccaggcgtggtggcacgcacctgtagtcccagctactcaggaggctgaggcaggggaatcacttgaacccaggaggtggaggttgcagtgacccgggaccatgccactgcactccaacctgggcaacagagagagactccatctcaaaaaaaaaaaaaaaagaagttaaatgaatacttttgaccattgatggaagttgctttcattccctcttacttaatcatctttatcttagccctgaaagagggatgytttaaccccatttgtaacaagtgagtctgaggctcaggaaagtgatagaatttagcaaagtccaccttgctacctggtggccccagctagaactcagccccaggtccatatacctaaagtcattacagcgtccactaaaattttgcccctctctcgatgccttcctctttagaagcctgttccttcagggatagatcccaactcagtgttacamggtactgaactctgattttcacaaaatatagtaactgccccccaaaattaataatagtatttttgagctgggcacggtggttcatgcctgtaatcccagcactttgggaggctgaggtgggtggatcatgaggtcaagagatcgagagcatcctggacaacatggtgaaaccccgtctctactaaaaatacaaaaattaactgggagtggtagcaggcacctgtaatcccagctactcrggaggctgaggcaggagaatcgattgaatccaggaggcagaggttgcagtgagccgagattgcaccactgcactccagcctggcaacagagcaagactccgtctcaaaaaaaaaaaaaaaaatatgtttgagtccttatgtgtcaaccactgggctatcccaacaccaatagctattatgattatgattattttttccattttattgatgaggaaaccaacacatagaaaggtaaaggaacttgccaaaggtgacggtcacacagccaaagagctgtagaagcagcacaggaataccagcaaactcacagccaagctctgcttttcaccttcacatcatacagtcctcagactaaaaccctaactctgaccttccaaatcaaaaatcatactcaaggccgggcgcagcggctcatgcctatcatctcagcactttgggaggccgaggcaggtggatcacctgaggtcaggagttccagaccaaccaggccaacatggtgaaaccccatctctactaaaaatacaaaacttagccaggcgtggtggtgggtgtctgtaatcccagcattttgggaggctgatgcatgaaaatcacttgaacccaggaggcagaagttgcagcgatccatgatcatgccactgcactccagcctgggcaagagagtaagactctgtctcaaaaaaaaaaaaattgcctaataatagcttggaagtgcacatgtcttctgtgaaggttgatggactacaattagcttcaaaacacaaataagtaactgtgtttaaatgaggccttctgtgtaatatctagggaaaatcaatgtggctattcaaatttgtttccccttccaagcacagagaagttgctcatgactctgtgatccgttttgtccaatgaaccatgagcagcagcagcaacttgagtcacctccaggtggaagtgttaagaggctctatgatccaccacattccgtttcccctgaagggtgatcaaggacacatgcagagatggggcttttgtcagcctggatccctgagtgaacacaatgaacagaccaccacacaatgccctaacacagcccagacatgcaacgtgaccaagaataagcctcactgtggccaggcatggtggctcatgcctgtcatcccagaactttgggaggccaaggcgggtggatcatttgaggtcaggagttcaagaccagcctggctaacatggtgaaatcctgtctctactaagtacaaaaattagccagacagtggtggcatgggcctgtaatcccagctactcaggaggcaggagaatcacttgagtctgggaggcagaggttgcagtgagctgagattgcaccactgcactctagtctgggtgacagagtgagaccctgtctcaaaaacaaacaaatacctcactgcatggagccactgagatttggggattgtcgttactgcaccagaacccaaatcatcctgaccgcttagggtgtcctaactagggtttcttcccaaaagcaaaggcatttttaaagttcgtgacatttaaacaaaagagcaaataccaatatctaccacttcgtcaggctaacaaacccaaacaaagccaacagccagaagttaaaataaacagatcattaggttgaaaatagaactgtcaaaacaggcacaattgacttcatttagtgattgcaaagaacatcaggcaagacacaggtgtggtcatcataacatttatcacatgcttaattgcacatgtttgactaagaaaaacacaaagtatttaagctcatctgtagttcaaagtgcctatccgtgtatttatctattcatcctgatgtatttattgagcaactcttttgtgccaggcactgtgctgtgttgcgggaagtcagggaccccaaacggagggaccagctgaagccatgacagaagaacgtggattatgaagattttatggacatttattagttccccaaattaatacttttgtaatttcttatgcctgccttcactgcaatctctaaacataaattgtaaagatttcatggactaaacttatcacttccctaatcaatacccttgtgatttcctatgcctgtcattactttaatctcttaatcctgtcagccgagaaggatgtatatcgtctcaggacctgtaataattgcgttaagtacacaaattatacagcatgtgtgtttgagcaatatgaaatgtgggcaccctgaaaaaagaacaggataacagcaattgttcagggaataagagagataaccttaaactctgaccgccggtgagccaggcagaacagaaccatatttctcttctttcaaaagcaaatgggagaaatatcgctgaattccttttctcagcatggaacgtccctgagaaagagaatgcgcacctaggggtaggtctctaaactggccccccggggcgtacctgtctcttatggtcgagactgcagaggtgaaataaactccagtctcccatagcactcccaggcttattaggaagagaaaattcccacctaataaactttggtcagaccggttgatctcaaaaccctgtctcctgataagatgttatcaatgacaatggtgccaaaacttcattagcaattttaatttcaccttttgcatctccttgaaatgtctgcctttgcacactctccctgaaagaggagggcaagggagccaggatagaaagtgaggtggagaagtgtagagctmtggacggacaagcaggagatacgcagcacaaggaagcacactaggtaacacaccaagcaggggaacctgtctttcactacataggcaagatgctacgggaaatgggctctgggtttacacagattatgactcagttctctactgttgtgaagctgtgtttggataaatccctcaacttttctgagtcttattttttcatttgtaaaatgtagatagaagacctactttcccacattgctctcaggtttaaagtacgtcaattaggatacagcaaagtctgtttgatactgaaaactttccagcaacaatgaaccttagaacaagtcatctctcatctttgctcttgcctgtaactactaagcgactactccatcttctgttcttagggattttaaattgttgrcgtttttgatttagtcaggaatgcgttgtatggggatatcaaacctgcatgctctccaagcattgactgtagtctgatcttagtaggtcgtgcacatataattttactatttctcaatttatttcggtgctgatgtaattagtaaaatacgatttaagagtgttatgatactttttaaaaatcgtgatgtcttttcttcatcaaagagatacttaaaagcacataatcatcttgtggaggcaagttgacaaaatcctttttgagattctaaaaggaatctttgtacttaaaatgtttaaggaccactgatgtattttggcttcatgtatcaattagatttagattttattgttttagagatgggggtctccctttgtcgcccaggctggagttgagctcacctcagcctcaaackcctgggctcaaactatccttctgcctcagcctcctgagttgctgggactaccatggtgtgccaccaatttttatagagatgtgatctcgctgtgtttcccaggctggtcttgaactcctggtttcaagtgatcctcttgccttggcttcccaaagtgttgggattacaggcgtgagccaccgctcctggccccgatttattaatagatcttataaggacattttaggcctcacgcatcagtttcttaggacaagcttttctctgcactgcataataaatcagacggcagtgcaacaaaaaaacggtgatgatttcccgaagaacaaaccaagttcagaagcctccctaattgtcagaacagcaggtagcctgggcggagctctgaggctatccttaaacaggcgcactgagacgcaaggcgctggaaacaaaagagctcctccttgcgcccttccgccgccccacttagtcctgctccgccccggacaccccgcggccccgcccctgtgcgcgctggttggtcctcgcaggcatgatgaaacttcccgcacgcgttacaggagccaggtcggtataagcgccagcggcctcgccgcccgtcaagctgtccacatccctggcctcagcccgccacatcaccctgacctgcttacgcccaggtgagccgggtcctgcgccccgtgccctgcgccccgcgccagcatcctcctcgcgtgccctggggctgctccggaaggaaggggtggaggatgcggtcttcagcctggcacccggsagacgcggttcgcgggcgcctgctgatgctgcggctcctgcggtagggagggcggggcggacgcctagcgattgttacgcacctgacagctagcggaaggacctttctgtcctggttccctgaagcatcgagagggaaccgcggccggcaggccggaccgctccggagaggaggcagcggcagtttgagcccctgtaaatgttatatgtgtacttttttttactatgtggcgtcgaagcctgtggacattttcgcggtccgggtccctgcggcggacgggtcggatcgtgctcgtggccagggcgcagtcaggtgtcgcgtggtcctgatctaggaagagactgcggccttatcaccgtctcggtgtctgctttcaccttcaactgmccccctcctcacctggaccgctcaccctcctcctcccctctcaccccgccatccccaccagtccccacctgtctctgtagactgcaagactcatcaagtgacttgctgagcaaaccctgccgagaagaggtctgtttagggacacaggcgaccaagtacagaaaaaggcaaaagaactagcatgcctttttcaatggctgtcattttgcagggctggcttcagatgattgttatagctttaaataaaaaggacagttttcatctcggcccgtggcctacattatttctttactgtccattgccctgggcgcttgactaataatttaacagcagtttttttttttaaattttaaatcatgattcatagcattgctgtaagagtaattagaggtaaagtagggcttgaacctgtctgtagttggttacttactgagatcttaatataaaagtaaagggagagggtgaagttgtaagtagcactaagtggaatagaaattaaatgcactgaaactgccatgtccagttcggtaggcgctagccacctgtaactgttgagcacttgaagtgctggctagtcctaactgagatgtattgtgttaaatacactggattttgtcgttggagtaggaagaacagtgtaaaatatctgctcgataatattttatattgattacatatatgttaaaatgttactatttgggacatactgagttaagtttatttaaaattaatttcacctttttcttttaatggggctactagtatatttaaaattacatatgtggcttacatatatatttattggacagcactgttctagaagtttaggaagaaataagaaaaatattgagaacaggtagcggcagtaggaactttgccctcctataagactgattccaataaaaataataggttatagttttaattggctttttcctactagaaaaaataagtgtactttacatgcctctttgttctccctttttcccctccagtttagtggttagaatgtatttattatagcaggattaatacagggattcactaagcagcgttaagaagacttaggtaactgattccctgatgaccatacttgattttcaaagcactttcctaacccgttttaaattgatatagagtcaaaggcagatggcttattagtagtcatctcatttaaatcttatggaatttttccagtaaatctcaaataatttgttataggctatttgggctatttggtcaagtgcatggaagagacagcataggacatgtggtacttcatttccaaattgcttgagatgattttcattctaaccatatattatttggttctggttttccggaaaagccagctaaacctttggttcttttagatataaatgaaatatcatcaaagaatagctcaaagtgacttatgcaacttgaatgtatattttttccttagggtgtttatcccaaaytatttgggcatttgctgcaattcgcagtttttttaaaaaaaacaccaaaatagttatttttcaagttagagatgttttaattaaaacatcttgtttttggtgtatccattgacattctcaaaacggaatgtatctggacctctgtgtacaatcttcgtagcactcagacactgaacagaaaggcagtcatcactgccaaacagggcccaaatgccacacatggtgcaatgtgtcattttgagctggcagcagccaaataaaacagccctttatttcacagttgagaatttgaaattggaaagtaattaacgtatgtaagggtgatttatttgcttccgggcttatagggatgagctaagttttttattagggatgttgttggtgtatatgtctcacctactttgcttccttactgaacaatgcaactttgagacagaaatatttgagaacatttttgtcagtgaggacattttgatagtgaatattttgtatcttctattaacttgaaatgttttatttgttataaagccaggatatctgatatcaaattaaattgttttttttttccctttagattttcttcaatcacatctgaataaatcacttgaaggtaacctrgatgtaatatagtgaaatgcttgaaagagctgcgtatcttttacacttacagcagtatgattttctgttgtacccattatatggtacctgcagctagttcagataaagagggcattwaactgtcaagggaacctgagaggagactctagtaatctggaaagtctgttggatctttgagggattttgggatggtgagagtggggctaggatctctggctaggttggagccagcctgcatttgtatctgtatcttggaagcaaacttagaatgcagagacagatgtggcatggacrctgtcagctctagccaaccactaaatcctaaggtgggagagatgcaggctttggctaggtgctaagctgctgtagccggttgaatgtagaggtcactatcttttccgaatacctgtaagtaaattaaatcattctctactcccatgtrcctgccaacctaatgggaaatcgctatagaaaagatggtttaaattttagtctttgaagtggtttatgcacgtttccggaatcaagatttaatgcagagttggaytggatattgaatatttttgatttgtctgcttttctctccatagaaagcttatagcttcattgcaccatgtgtggcatttgggcgctgtttggcagtgatgattgcctttctgttcagtgtctgagtgctatgaagattgcacacagaggtccagatgcattccgttttgagaatgtcaatggatacaccaactgctgctttggatttcaccggttggcggtagttgacccgctgtttggaatgcagccaattcgagtgaagaaatatccgtatttgtggctctgttacaatggtgaaatctacaaccataagaaggtgaggagaaagaaaccagatgtctggatgcgattaaacttcagagtttgttggttaygatgatgytacatattctgtatcatgctttttcctttgcaaagcactctatgttcgttatctcatttgctctaagtatgtaaatagggaactgatgaataaaaaggtgagtgaaatgacttggtcacaaaaaaagtgataaaaatggggattacagttcagtttcattgactcttagaattttttctccttctccccagcttttcattttgaaaaaattcctaacatacagtaaagaacagaacaacaagcacctagattaaatagtcattaatgttttgccatagttgcttgatttttctttctacacacacrcacacacacacacacacatgtttttgctgaatcatttgagagtacagtgcagatattatgacactcctaaatatataagcatttatctcctaagaataaggacattcttctacataacatcaatgccattattaaacctaagagtccataataccacctaatatccagttaatacttaaatgaaatttccctaagtgtcccaagaatatttttatttatttatttattttgagacagagtctcattctgtcacgcaggctggagtgcagtggtgcgatctcggcttactgcaacctctgcctcccaggttcaagcaattctcctgcctcagcctcccaagtagctgggactacaggcacctgccaccatgcccagctaattttttgtattttagtaaagacagggtttcaccatgttgcccagggtggtctggaactcctgagctcaggtaatctgcccaccttgacctctcaaagtgctaccaagaatatctttatagctggttcttgtttgttttgagccagatttcattcaaggttcatgcatttggttggtatgtttcttggtattttttgagacttcttgatagatacctgtcaggcattgatagagatttacatcctaatcacattttggacatttttatctgtgaacaatagcttttgtcattgtttgttgcctgctcataggaagactcttaataatagtcttctcatttaaaaagttttaaaatagttattcaggaaattccttttacacatttctttattcctttattaagggtctactatgcaccagacatcatttttytaggtgattggagatgaaatggtgaaaaggaaaggcaagaatggaatttcctgctagtgggaggtagaagaagagagtattaaaaattttttctaagtcaaataatgtcatatacatgagaacgctaggtggtattatggcattatcagcttggctttccccttaaatgaaataggaagtgccctgtttcacttgaacagtgttatttcttttattaaaaagttacaagaagttaaatattttgaaaataattaatttctattctaaattagccaaatgttatatttgtaaaagtagagaagtttgttccattgcttctaccaagcatctaagtttatgtagttggggcagctagcagtctgtctaatgagcagaatgtatactttaggcttatataaagtattcagaaatcccccccacacctcctttttggtaaaaataaagtttaccactacaataaaatacagccagaggtgtactgggagtagaaggagactgaatgaaagaaaggaggaatggggtaaaggctggggcaaagagcaggccctctccctgcaggggagtatcagggcctgcagccaagtcaaatgacagcatgacgtcaggaggcaagatttgagggcttttatttaaggtgcagcattggagtttggttttaggagagtaggaagtaatacatccgttacccaaaggacccttctcctttttaaataagttacctgcaaagtttaggccaaagaggtgggtaaggtagatttgggaagctgttgcttactaatatcaccgaatgctttatggtcactaacccttcaggcagttcagcccagaagagtcagcagaagactgtttacaggcccccacctgctagttacagatcatccctgatagagcagagaggggtgaccaggtagtgactttgtagtcactggaggcaaagcccatttttggacagttcagtgaggacttatagacaaaagattcacaaattatggagtgagttggatggagtgtgaagcatatttatgggtcatgcacatacataataggtttactttttgaaatttgaaagcatgttttaagcttatctaggatttccacctgatttaaacctcttctttctctaatgtcagccaaaaacccgagtacaaagaagaaagaggaatacatcaaggacttttcatcctcatagtttgccattaatggctcatagtttgccgttgatggtggagagtgtcagaattggggagtagcctaatcaaaccttcttactctgcatgcagtggcagacagtccctttgctgttcttttggggaatgcagactaataaagcgccaccgtcattttatctatcagtaaggagtagctttaatgctactgcagtggtggaagcactgggcattgtcatccacccctggggaccagcagctttgttttggatcatgtatctgttattgtgatggagccatttatttttcagggaatgatgccaaatgatgtttgtccctttgctttacatttttatagctaggactttgaagctgaactggaggaacttcttagccaatactatcttctcaaatcaaaagtttatagttgcaraagacacgttttttagtgtcatggcaaccaggcaacctattatcttaacttaaatttagaggttgagcatccctaatctgaaaatctgaaatttgaaatgctccaaaatctgaaactttttgagcactgacatgacattacatgtgcattttgatgtcacagtcaaaatgcaggtgtaaaacacgcagtttatttggcgttccctagggaaaaaagaccctctcagcccgcttcagctgcagtataacttttctacacatgcccggatttccccatgcaagcacgcccacaaagggtaatagaatggcacatgttcaagctggatacgccattggcaggatccccacagatgggacttatgtgcattatccattgtgtatttttgcttattttctgctctgtggtgttaagatactgaaaatgtcaaaaagacctgtagatatttctatgagcagcagtgataaggaaaagtagaaacacttataacacagaaagtcaagctgtaggagaaactggactgtagtataaaggtatagatgacatggtgaaaatgtgtgatagagatattgaaggactagagctacctgcattcataacagaacaagaggtcatgtcagtttataaaatcaaagagagccttccaagacaaaagccattgttaatgaagcagatgactctggagaaacatttaaaagtcatctggccgaatgcctcttcartctcagaggacccgcttcctagttgctcagctgcttctgatgtttcttctcacctgaaaaaggaaaaaaaaatacagtgtatagtaaccttttaatcaaaacgcagcattgtaggtggagtctgaaagcctgccattgtttgtacagctgtttaacagctgatgcaggtattctggtgattctactatgctacttattactttcttactgtattaatggtatgtcatattttataagcatatgaaaatgattgctcatcagcagcataataaattcagagtcaggaatgatggtcaatgatgtcaaacagccacagattttccacatggtagctgagatagtgacccctttgctttctgatggttccatgtatgcaaactttgtttcatgcacaaaattatttgaaatattatataaaattacctttaggttttgtgtataagatatatgaaacataaatgaagttcatgtttagacttgggtctcatgcccaagatatctcacatatatgcaaatattccaaagtccaaaacacaaaacacttctggttccaaacatttcagataagggatactcaatctgtatatatataaatatatgtatgtattacatatatggtatgtatataatatacatttccatccctccacaggttactgttctggcacattcccattatgttctgtttatcagactgcaactaaaattttcatgggttcggctttatgttgaacagaatttgcagaatatgagttgaagcgaaccatagtttaataatgctgtgattctcctaaatcaccaaagtgcatgaaaggattatagagctcagaaatactgaagcatctttgcaataaaaaattattagtgaatgtacaaggagtctaacattttggttttgctttcgcttcctaagatgcaacagcattttgaatttgaataccagaccaaagtggatggtgagataatccttcatctttatgacaaaggaggaattgagcaaacaatttgtatgttggatggtgtgtttgcatttgttttactggatactgccaataagaaagtgttcctgggtagagatacatatggagtcagacctttgtttaaagcaatgacagaagatggatttttggctgtatgttcagaagctaaaggtaataataaatttttctatagattttcattattgtcttggttgtacgttttcttttaaattatatttgaaaatctcttrgagagcaatccagaattttacaagtgactaagttatgagtctttaccttttttwaaaaaaacagaggagttgtactctccttttcagcacttaaattctgtaatccttgaaggatgattctttagtgcagtcgtttattttttgctgtgcyaatatgctctacatctagcttgatcttaagtgcagttttaagttttcctgtgtcatactataatcgtagggttgactctgcaattattgcattgtggtactttgcgcagttatagcacagcaagtgttaggatttctaaaacagctttattgataattcacataccatgtaattcacccacttgaagtatacagttcagtggtttktagtatattcacagatgttggtaaacaacactccaatcagttttaggattgtttttccacctcaaaaaaaaccaaatcaaatcctatgccctttaccttagtttttgctggcaggatcaactaggtttttgtttgtttgtttgtttgaagagatggggtcttgctcagtcgcccagcccaggctggagtgcggtggtttgatagctcagtgcagccttgaactcgtgggctcaagcgattctcccacctcagcctccctagtagctaggagtataggcatgcaccacaacaccctgcctcctgtgccctttagctttgaattccatctctccatatccatcagctgcacccctgcagttgtagccccggcaatcaccagtctttctgcctctggattccctattctgtatgtttcatatgaacgggattatatatcataccggcttttgtgactggattctttcacttggtatagtgctttcaagatwtgtctatgccgtagcatgtatcagtacttacttcttatggccaaatgatattccattacatggatacactgcattttgtttattcgcttgtcagttgatggacatttaggacattatttaccccttttggctattatgaataatgctgctataaacattggtgtacaagtttttgtgtggacatttcccttgggtgtatatctaggagtagaattgctgggacacatgataactatgttcagttgaagaactgccagactaatttttgaaatggctgcatcattttttattcactccagcagtgtattaaaatttctgtttctccacatcttcacaaacagtgtgtgactttaattctagccattctagtgtatgtgaagtggtatctcattgtgattttgatttgtattttcctgttgacagtgatgtccagcatcttatcttatgcttattggccatttgtatatcttctttggagaaatatttgttcagatcctttgccatttttttttcctgttagggatcattttattttaaaaacataatagactttatttttttttttgagcagttttagaaaaaattgagaggaaagtgcagagagttcacatatgctccccctacagtgcccctgcccagttttccccactcttaacatcttgcattactgtgctacatttattagatttgatgaactgatacttatatattaactgaagttcatagtttacataagggttcactctttgtgttttatagatttttggatttgacaaatgtttaatgccatgtacccaccattacagtattatgtagaacagtttcattgccctaaaaatctcctgtgctccacttattctttcctcccgtcctcttcctcctaaccccccagtcattactgatctttttgctttctctctcactttgcctttcccagaatgtcgtataatagttgtaatcatatagtatgtagctttttcagactggcttctttcacctagcagtatacatttatagttcttctgtgttttttcatggcttgatagctcatttattattattattattatactttaagttctagggtacatgtgcataacgtgcaggtttgttacatatgtatacatgtgccatgttggtgtgcttgctgaataatattccatttgtttgcatgcaatgcaatttgtttatccattcttgaaytacccatttctaattgagttattttgtctttttattactgaattgtaatagttccttatgtattctagatacaaatcccttctgttcatcagggttgcaggatacaagatgaatatacaaaaatcaatggtatttgacacactttaactgaatactacatacttaaaatgagcaatcaaaatgaaattaagaaagcaacttcatttataatagcatcaaaaagaataaaatacttagaaataaatttaagaagtgtaaaacttgtactctgaaaactataaaatgttgttgaaagaaatgaraggagatctraataaatggaaaagtatcccatgatcatgatttgaaggcttaacattgttaagatggcagtcctccctaaactgatttacagatttaacttgatccctatcagaatcccagatgagttctttgtgaaatctacaagctgactctcaaattcatatggaattgcaagagactaagaatagccaaaacaatcttttgaaaatgargaacaaagtaggagacctcatattaactgattttaaaacttactacaagacaatggtaataaggacaatataatactgacagaaggatagatgtatagactagtgggatagaattgagagtcagaaatgaacccatacatatatgatcaacttatttttgacaagggtgccaagattattcagtggagaaagaagtttgaaaactggcacaggggcaaccagatatgtaaccatatgcaaaacttggagttgaatctttacccaacatcgtatacaaaaattatggatacagaaaaatggatcaggccaggcgcgatggcttatgcctgtaatcccagcactttgggaggccgaggcgggtggatcacgaggtcaggagatcgagaccatcctggctaacacagtgaaaccccgtctctactaaaaattagccgggcgtggtggcgggcgcctgtagtcccagctactcaggaggctgaggcaggagaatggcgtgaacccgggagacggagcttgcggtaagccgagatcgcgcaactgcactccagcctgagtgacagagcgagactcatctcaaaaaaaaaaaaaaaaaaaaggatcaaatgaatcagttttgaactaatccacttaaatgtaagggctaaaactataaaatcccgagaagcaaacatagaagtaaattgtcatgaccctggatttggcaaagctttcttaaatatgagaccagcaacaataataaaaatcaatgaattggacttcatcaaaattaaacatttttgcacatcaaaggacaccatcaagaaagtgaaaagacggcccacaagttggaagaaaatacttgcaaatcatgyatagcactttttgatggtaaacttgaggaagacatttatcttttatcccttacctgtacagcagtaacatcctaatatctctctccctgcctctttttgccattctttaaattctttctcacttaattttcagatttaatattggctgaagcagggataatgagatcartcaaaggggtccttaggacactagtcacagtgtttgtactaatactggaactggcttattttcaggcatttctagtgtgatcagatggcaaagaacaagcatatatatatgtcagttgccaggactgctgggaaagcctggtaaagagaacactggggaaaagcagcctcctgctcccctgggccttctttgagcctgatgatcacttgmtatggaacttaccctctgaaattccttaattgttcttttctatatccttgacactgtccttttccagaccaaattatctcatctggaatactgcaacaattttcttttctcagtgcttttagaataacctgtcaaaawctcatctgattatagtattgcctgcttaaaaccttttaattactccccattccctatccgggttgtgtagctcacttgagctctgctggctggtgagggaatctgggtcctttttctggtatttgaattcagygctacacaggttactggctgggtagacaatctcaaattgtaaatcacgagtattccatgtagatagtccattacgatctacaataaaacattgatgtttgtatcaaagatcatggtgatgagaggttgggtactgtactgtctgtgagaatttattgaggaaatttaagttatatggttttattcacatatagtgtataacaactagttaagggatagatgtcttcttatctgactttaaagtaggtaaaagtggatcattgtacttgttaaaggtctgggaaccatggctgtgttctgaaaatacctcagtgatgacaaataaatgactcccagcctatcataacattaggactccagttcatccctttgcttcataagtgtgtcttttccttttgtgtattkgctttagtatagaaaataggttttcttgattagaaatctaagaagaagaaattgaacactggagatttttctatttctttgaattacgaaaagttagtgtaatttggcagtatatccctgtgccattattgyctctcaggtaagtagatggtagggcttaggaaaatagaaaattttttttcctattttgcttatttaatgggtatgtgtttgtattaaaaagggaaaataggaaygtagatgatgttaactaatcgtgaaagttattgggaagggttacctaatttgaataraggtatcattgtgaatttctaggtcttgttacattgaagcactccgcgactccctttttaaaagtggagccttttcttcctggacactatgaagttttggatttaaagccaaatggcaaagttgcatccgtggaaatggttaaatatcatcactgtcgggatgwacccctgcacgccctctatgacaatgtggagaaactctttccaggtagcagacacccacccacctattccccatccttctccaagggaaaaaaattttaagttgtattctcccatcatttgaatgattttagtttcaagacctacttcctattttgtttggagggaacacattaagatttggcacactccaccattgagtaaataccatcatgatagaygttgatgattgtgtatttcatttcaataactaatccagcccaagattttctggagctgtttgatttactgctgtgtttataggttttgagatagaaactgtgaagaacaacctcaggatcctttttaataatgctgtaaagaaacgtttgatgacagacagaaggattggctgccttttatcaggtgaagtcaattaaaaaaacctaattatatttcatgtgtgtttaattgaaatgatttgtagccatccctttggtttttactataaaatatttactgtatgatttactctttccttcattataggatggaaatgattttttataagctgtatttaatagtcatagtcatactccaacttgagttacactatagctrtgttattggtgttaagagtgagtcagtgaatgttctttagaattctgtgtagtgatttttaaccaattcaaatactactattatcacagtttatatatttttctcttgttgaagttgatttcagtttataaaacttggcggattttaaatagtaaaactatgatcttggtgtttatcaggaatatacatcttctgtccctgtcttatgcaaggcacataactaggacacttccacttcctyttttgcatgtagggggcttggactccagcttggttgctgccactctgttgaagcagctgaaagaarcccaagtacagtatcctctccagacatttgcaattggcatggaagacagccccgatttactggctgctagaaaggtaaggtgctgtctctgtcccttgtgtagtgtagttagagtagacttgttattagaatgaaaatggagtcaataatgggtgattctactgctgctgtattgactgggtcaattgwtttaaattgattgtattaaaatagaatgaaatggctgttggatatgcactgtgttgtacactgtcctctgtgtacttttatctgttatgacccatgcaattctcacaaagaccctatgatgataagtaygctcttttgaaagtaaaggtgtctgggcatggtggcctacacctgtaatcccagcactttacgaggctgagggaggtagattacctgaggtcaggagtttgaaaccagcctgagcaacataatgaaactccatctctacaaaaaaatacaaaaactagccaggcttggtgaygcatgcctgtagtcttagccttatgggagcctgggtgacagagcgagaccttgtctcaaaaaaaaaagaaagtaaaggcataagtcaggtgcagtggcacacacctatagtcccagatacttgggaggctgtggggggaggtctgagctcaggagttcaagtccaggctgggcaacgtagcaagaccccatcttgaaaaattaaaaaaaagggttttttgttcgtttttttttttttttttttttaaacgtaaaggcatagtatcatggctaagactgcagactttggaacctgacttgtggtttgaaatcctggctctactcatttatgtaacmaaaataatagtgtctgctatggggaaattttaaggtgaaatgatataattcatgtaaagtaagtagggtagaacttagcatgtagtaagtacttaatgagtgttagctgttattattatttttgaaagtactgtatttagaatactgtgggcagagggcagcttgtctgtattcagtgagcgggagacctagttcccactatggaggactttcgtagcatggatgagaaaaagctagagagcagtctcagtgcaaggtaatcaatgccgagagaatccaaaatagccaaggaaagcagaatgaggggaagggccattctatataagaataacatcctggatataaaattaggcatttaagaaggaccaaaaaagaccaagcttagcgtgggaccatgttggactagagagagatgaggtgggttaggtaaaataggtagagagggaggtgccaactgggagaatggttgaagccttggcaccagaggagctgaggggagacttacttcctggtggtggagttgaagcaggcgagggaacagtgctggatggggcttgtatgtggtgggctgtaaagtcatttttctttttttcccttgtttagttttcaccattgttaattcataragctttgtgaactcccatcatgtttgattttcaagggaagttattttctttaacaagtaaatgggtatttctttatataataaggtggcagatcatattggaagtgaacattatgaagtcctttttaactctgaggaaggcattcaggctctggatgaagtcatattttccttggaaacttatgacattacaacagttcgtgcttcagtaggtaaggtattatgatattcttaaataaaaagctttttttaatactgaaaaaaatgtaaggtttaaaaaaattatttcaagccatagttttaaaatgttatttaaggatgaatgcaaattaaatccctatgttactgattatttaagaccacttaagaattctctgaatctcttttggagtgaagggaatagtaaatacgtagttcaacctccacattgttggtgtcactgttggtgtttccccagggagcagatacatattttctgccctctacctcccatttctcttatagtttcttgggctacagtctatatacagtgaggaaataggtctttttggtaatgcatttttgataagaaatagtcattttagatatattccatcacacaacttaccagtcactagctatcattgctctgcaaacaatactaattttatcttgtagataatgtatctactgagattggaagtataccccaaatcagactgatccagtgttattgagcctttatatgctactgcctcccttgagagacttgccttggaaggcaaaaatatcttaggtattacaatggtttatggccctccaaaacatcacartaaataagcagatagacaggatagctctggtattggaatttcatggggctggggtgaggttaggaaaataagtgtctaaaaaggctctctagctgaggtgataataaaaacaaggttgagaagaaacactggtttagagagatgtggtgcaggaccaaggaggcaagtttaataacttatatagtctccccagctttatgtgaaatctggtaaatggggagtggcagggggaaaatacccatcaaaattaacactaaaccaccaaaacggttattcttatttttgtgtcataataccactatgaaaggcatgatttttaggtatttgagtcattgttcagcttagcaaagttttgaggtggacattcttggtctaaaaacattagaattttaaaacctgtttagaaaatgacaaaatggttccgggttattttattttacagtagtacttttggattaagtacatataaatggcttataaatacmaggtcattattgtggaaactactttatattaatatgaagtccagtatagtagtaaagctttcaattatttccaaaaatcaaatcaaaggcatttttggtggaaggttatgttgacattaaagttaatttctctctctcatttaaggtatgtatttaatttccaagtatattcggaagaacacagatagcgtggtgatcttctctggagaaggatcagatgaacttacgcagggttacatatattttcacaaggtaaccactctgaagtggagggatattcatgctatattaagaaaagtatgaattgtttgactattttctatcatctttcagtatgacagtgatatttttgagtatcttgtgaggttacaaaagggaatctgatagtgtttgctttctatctcttggggaagaaagaaattttaatgtgtcagataatttttattctttaaaactagttacagctgggtatgagggctcatgctcatacccccagctgctgaggaggctgaggtgggaggatcacctgaacccaggagattgaggctgcagtgagctgtgattgcaccactgcactcctgcctggttgacagagtaagaccccgtctcttaaaaaaaaaaaaaaaaaagttaaaaataaataaataaaactacttaagcttgagaatcccctttctgccatttcttagcatcctgtggaattatgactgttgcccattgtgttcattttattctaatattagcagtttggtaggaaggaaggcatgttttgtgaagcattgcttacctctgttcagttatttactcccttccctaaatttgtttaactttttgtcttatccacctttaggattggagagggagaaagaaaaactgctttgtgtgccaaaagcaaaactcttggtgtttttgtttgtgaaataggctccttctcctgaaaaagccgaggaggagagtgagaggcttctgagggaactctatttgtttgatgttctscgcgcagatygaactactgctgcccatgggtaatatttttagaggctattgtaaaacaaaaacaaaaaaacaccaaaaacraaacaaaacaaaaagctcaataccctgagaaaataaaaatcaatagctgattggctatatgttacatatagttggctatatgttacaaastgtgacttttatagagaaaatgaagctgtttcttaactttgtcccaaaaggattaggccacatttcaaagtggtgttgtggtatatggagagaagtcttcttccataggttgtttgaggtggagttttcacctttaaagggtaacarcattctgctcacatctgaacaaccaagatggaagaggcaaggctgctacagcagctaccgttaagtgttttaaagagaagtaaagatcgtaaacatcatgtgacaagtagtgagtgcccaccatgcccatgtggtgctgtagtgaccctgagggaatagagtagtgaagatacaaggggtttgattacattataaagaaccaggtttctttggttatcatttctagttgtctaaagttatgttgaagaactgaagacttttactgtacaggataaacaactgacattaaatgtcttagttgcctctgctgaatcacacctagataaggatataattaaatatgggtttgaggaatgaactgaatctggtcattatcctctctgcttgtcctaactagagtcactaggcttcaggaaaccggtgatttggaatttgatgaaatatagtgggacactggtttatatcgcatattgtatgtgaatttttaatcagtggcaaaaaaatactgtatcgtcatcacaattgttagaagagatggtctcacctagtaaacactgagttaggtctaggcaaggtattttcttaatgattgggtcactcatgttttgtaactttttctgctttttgaaatatgcatttaactattcctagaagggaaagtaaaagtaatagtctcagttagttttactccctagatgacatgatatatgtattattttaaatgaagatttattttttgtatctattcattagtgtagggcagtcattaggaggcttgtatgtgactgtatgaccttaacatttcttaagatctggttgaattgatgggaaactgaatcagaacctaacctggcaggcactaaatacccattttaatttagattttcttcttttctcctttaagtcttgaactgagagtcccatttctagatcatcgattttcttcctattacttgtctctgccaccagaaatgagaattccaaaggtaggtaaatcaactcaaggtaaaactgtccattgccatcagattatatttgtaatttttacctgatgctcctttttttgtcacgtcagaatgggatasaaaaacatctcctgagagagacgtttgaggattycaatctgatacccaaagagattctctggcgaccaaaagaagccttcagtgatggaataacttcagttaagaattcctggtttaagattttacaggaatacgttgaacatcaggtataatgtctttaaaaacattttcaggaataagacagtttggatgcagagctgtcattgctgttcattttgtatttagtttgaatgatacatgtatttagtttgaatgatacatgtatttagtttgaatgatacatacatcagatatctctctgataggatgtccctatcagagagattcagagtctctgtaaacaattatctcttttgtaagaattacgtaagaattaagtagcatgaaggattataaagtagcatctagaatcgagagagagaggagacttactactaatcatcactgattttcatttatcagatttttgggcacctgctgggtgccagatcttgttaggcacaaatgactaaaacagagccaccaagtattaaaaatatgcatatgagtgttctttaaaaggcactgcagctatccatattatgaatacttyagcattttctaagtgatgggtgattcaaagggtctcatacaagttacagtcacgtcttaacattttctgtttcgtgaaatgagactaaacacaagtatttcctgccattttaarccattttgctcttatatgcttattcttacaggttgatgatgcaatgatggcaaatgcagcccagaaatttcccttcaatactcctaaaaccaaagaaggatattactaccgtcaagtctttgaacgccattacccaggccgggctgactggctgagccattactggatgcccaagtggatcaatgccactgaccmttctgcccgcacgctgacccactacaagtcagctgtcaaagcttaggtggtctttatgctgtaatgtgaaagcaaatatttcttcgtgttggatggggactgtgggtagataggggaacaatgagmgtcaactcaggctaacttgggtgtgaaaaaaataaaagtcctaaatctaaaccattgctgtagtcatttatgttcatgcagtctcttcataagaggtaactagaactgttttgctgtatcacagtaaagtggagggtaagctaggaaaagggaaaatgatcagatgtctgcaagaactcacagccctctcctggcagagctgctttagatgacatttgcatcttgtgcccgtgtggcttccttccagtccttgcctcatcttagggacgtcatcaaaggactacactatttttgttctgcctacattcctaacagctgcctaggcagactcagacttgaatcttctataggagttcatcacagctctattttgcaagatagtagttcatttttttctcttttatgttgagccaaagccacttctggagacttgtcctagagcaggggtcaggctttttttgaatttttaatttgtttttaataaagagccagatagtaaatattttaggctttgtggacctcttttggaactgttcagctctgccattatagtgcaaaagcagttacatagacaatatgtaaacaaacgagcgtggccatgttctattaaaagttacttatgaaagcagatggtgggccagatacggcctgtgggccatagttagttgattgctgttctagaggaacaactaagctaactaagcatttctgatgaaagtctaaacctttgtcagatgagtagattgcaaaaattctctcccattctgtaggttgcctgttcactctgatggtagtttcttttgctgtgcggaagctcttgagtttaattagatcccatttgtcaattttggcttttgttgccattgcttttggtgttttagacatgaagtccttgcccatgcctatgtcctgaatggtaatgcctaggttttcttctagggtttttatggttttaggtctaacatttaagtctttaatccatcttgaattaatttttgtataaggtgtaaggaagggatccagttttagctttctacatatggctagccagttttcccagcaccatttattaaatagggaatcctttccccattttgggatctattcatctgtcaaagggctaatatccagaatctacaaagaactcaaacaaatttacaagaaaaaaaaaccccttcaaaaagtgggcaaaggatatgaacagacacttctcaaaggaagacatttatgcagccaacagacacatcaaaaaatactcatcatcactggccatcagagaaatgcaaatcaaaaccacaatgagataccatctcacaccagttagaatggtgatcattaaaaagtcaggaaayaacaggtgctggagaggatgtggagaaataggaacacttttacactgttggtgggactgtaaactagttcaaccattgtggaagacagtgtggcgattcctcaaagatctagaactagaaataccatttgacccagccatcccattactgggtatatacccaaaggattataaatcatgctgctataaagacacatgcacacgtatgtttattgtggcactattcacaatagcaaagacttggaaccaaccaaaatgtccaacaatgatagactggattaagaaaatgtggcacatatacaccacggaatactatgcagccataaaaaaggatgagttcatgtcctttttagggacatggatgaaggtggaaaccatcattctcagcaaactatcacaaggacaaaaacccaaatgctgcatgttcttagtcgtaggtgggaattgaacaatgagaacacatggacacaggaaggggaacatcacacaccagggcctgttgtgggctacagggaggggggagggatagcattaggagatatacctaatgtaaatgtcaagttaatgggtgcagcacaccaacatggcacatgtatacacatatgtaacaaacctgtacattgtgcacatgtaccctagaacttaaagtataattaaaaaaaaaagtgagtaccataaaaaaaagtctaaacctacttgaaagagaaagtacaataacgcattcaaagaacaggtagaagattttcatttgaatgctcattggttgtttagggacaacattttgaaatacattataaaggtgaatttagttcttagaaacttttgaaaagggaattgctggtgtacagataaatacaaggatgcttaatagaggagtgagtaggcagaaaattatctggtaagttggaagaagggtgtattttaggctacccataagcctgtatgatttaagaatatcgctaagaaagtgaggaaagtcattcatcttagatgacttttttttgtttgtttttgttttgttttagrcagtcttgctctgtcayccaggctggagtgcagtggcttgatctcagctcactgtaacctccacctcctgggatcaagcaattcttgtgcctcagcctcccaagtagctgggattacaggcaggtaccactgtgccagccaatttttgtgtatttagtagagatggagtttcaccatgttggccaggccagtctcaaactcctggcctcaagtgatctacccaccttggcctcccaaattgctgggactacagatgttagccactgcacccgggcctagtagatgacttttaatgataatcttgtgtttgtaggtgcttaagttgcctaaacctagaatgatttgattctaggcatatttattcctggtaaagcctcagacagccaagctaaatgacatcgaaaatacttgggaaacttggttgagaatgattacacagtgtacatgacaagattcatgtatgacataaaccccaaattgccagttttccagggagtggggtctggctctagatttttaactttagtgactgagatttggcatatttagttatcacccagaagtttgatagtaaagatacttagttaagccaatttcatagcagcaaactatacgtcaattataatggcagcacctttctggatttcaaactacacacaaggcttatagaaggttcttggcacaaagaataaagctagctttttctcttcttttgcaatttaaattatagaagatttgaagaaacggcccttgaattgttgtacacatgacttaatagctcacttattggctaaacctgttttcctggatattggtaatttagtgccaaggaggcactaatctacacagcatctctaacagccaatagtccagttcttttgagcataaactaaaagattattagctgatgtcattctgccatttcagtctgatgtgagcactgtcgtgaatgacccgccctttagaggtttatttcactttctcttaaaatctgctaaaaggtaccgtatagtttgacagaatgatacacttctattttaaaaaaaaaagaaaagtaaaatccacctaaaatctacttttaaagttttaacattttcttgaagatcttttgctacaaagggacaattgtatatgtgtggtaggttatcttggttgacataaggcctgaaagcttcttaagtcctttacaaggaaaaacataaaaaggaactaaccttaagcctatgatagcccagtctccagaggattatactttgtgggaaatttgcttgtattagactgtgatatgaacatcttgagcccacagagtcagagcatgctcctgaatgcctcctgtcttggaattgccttagtttggtctagaatctttgataaaggatcattggactaggtccctaagaagggaaagtctggccacgaagaagcaaagtggaagctgggcagggaggcagttatgtgtggttctagactgtgcagtggaaaaatcaataccaagcatgtactttgcagcttttctaagtacttttattgtgttagctcattccaatcttaggaagtgtggcagattttattttctaaaagtggccatagcagtgttcctggtcccatgtactcttccggagcctggctgcccccctgaagaagcagcctatttcttctctccttgagcctgggcaagattttgcaattgcctagtagtagaatacagtggaagcgatgctgcatgacttctgaaaccaggtcacaaaaaatgatgtagcttctgctttctctcttttgatgtataaggaagcccaggccacgtggagaggctgtatgtgagtttgggctgactcccctagcaaagggcttagtcgacagccaacagcagccaccaactgccagctgtgtcagggagtgaggctccagatggttccagctgctaatctttgagtcttctacctggagcccatgcatgggaaggagagatgagccatccctgttgtgtgctctgtccaagttcttcattcacaaatctgtgagcataataaaaaagcttgtttgacaccattaagttttgtggtttcttacacaggcatagtaactgaaacagatgaacactgttacccccattttacacatattaaatacgttgctcagtcatttggctaattagtaagtggtggaacctcaaattagctaggtaggttgactgcagagcctttgagttgttcttttctaaatattgtcttgcaatgtcagcctgaaactatatcctgggtctctggtgtgagttgggagactaagggaaagggcttttattgggagcaagaacagggattgcagggaatctcccagggatggcagtgaggctaactgttttctgtaatggcatgagctaggtgatactgaaaaaacaattccaaaatttcagtgcattgtcacaaaaggttttttttttttttctcaaactatgtgtccaccttagcccatggggggctctgcacattgttgagggggttataagcactctggaaccgaggctgatggagggacgaccttgacataattccaccatcagcaaggcaggggatggagaaagtggtgaattatttactgaaacttaaagcttccactctgaagtgacacatcacttttgttcacattacatgtaagtcacgtggccacacctaacttcaaaggagcatgtaccagaaaggaaaataaaatatctggagaatagcactagtgactccccaaatctgctcttcggtaacaaaatactgaattcactctcctatgcaagaaatatattcaccccctttggaaggttacaactgaggaattccattgtgcaaggattccaagcccagagtttaggatctctgggtgatgtacttatgtggaaatctatttcagggctggagacggcacttcatgaactaagaaaaaagtgatctgctccccatctgtccactacataattcagcaggaatagaataactgcggcaacaacaaaacatattcaaaaagaataaaacagaagaaatatagcaagccctacttaggagcaattttgacatcctgtggtcagtcacttgagggcctccaactccagcagaaaattacccttcagggctcatcagccgccaagtcatcaatgtgttggcagaaggaggcagattgaaagaactgggagaatcagtatctgagcacaggtgagaaagggaacagtttgtagggaaagggttgatttcgagcaataaagccaatttggctcataccattataattgtggttatacagagtaagtgttaacattaattggttacccttcctgagtgccaaggactgctctaaaaggtataatcagtcttcacaacagtttgtgaagtttgttcctttgagctcatccatgttttgtggataaggaaagcaacatacagaggtgttacattgcgtgcctgaggtcacatagctaacacctaatagaagtgggatattggatcccaggtttcagggttttagagaccttatgcttaacccctactctgtgttacttttcaaagggatagactatagaatataattacatacatggaaaaattataattccatattttttctctacttctgtcttgttaatgggagtatatggcctattttatgggtagctcataagttatttaggatatctataaatttaagcata

SEQ ID NO: 94201 - DNA, 114503 bp, Homo sapiens
  misc_feature (1)...(114503): n = A,T,C or G
aagtttgagaccagcctgggcaacataatgagactcttgtctcaaaataaacttaaaataaaataataaaatatagaataaaataaaatagccaggtgtggtggcatgcatctgtattactagctacttgggaggctgaggtaggaggatcacctgagcccagttcaaggctgcagtgagttatgatcatgccactgtactccagcctgggtgacagggagagaccctgtcttagaaaaaaaaaaaatgaagttagatccctactgcacagtcacttataaaaattaactcaaaatgggtaaacaatctaaatatgagctaaaatcattacctcatagaagaaacataagggtaaatcttcataaccttagatttggcaatggattcttagatatgacataagcaacatcaaaattaaaaactttcaaccttttgtgagtggtggctagcactaagagaagccaggaaggcctggggcacacatcaagaacacaaggtggtgggggtgttgcctgaccacccccaaaagctgcacaccaaccctctaccccatgcgaatctttgagcctctggcactttgtatctcagctgaagaagccttcagtggaaactgtctccagtgggcaggtgttggagaacccgccctcttcaggtgaagagtttgggcatctggctgcactatcctccaagtggcacccaaaacctgcactgggaacatgggccctgacctggtggacatcaccacctggtgacagagtgccaggcgcattccatccagatgaggaagatgaaggagactgcgtcagaaagtgctgccagtcagcaatcaattccaccacttcactatcaagttctttctgccccaccagtcctgccatgccagcatgagccacactttgttaacaagaaacccaataccttctctaggtacagagtcctctccacccccaagacagcccagataaactccttaggaacaacaacaacaaaattaaaaacttttgttcatcaaaggacattgtcaagagataaagagaggcctggcacatttgagaggctgaggtgggaggatctcttgaggccaggagtgcaagaccagccagggcaacaaagcaagaccctgtctctacaaaaaataacaatattggccaggtgcggtggctcacgcctgtaatcccaacactttgggaggccgaggagggcggatcacgaggtgaagagatcgagaccatcctggccaacatggtgaaacaccgtctctactaaaaatacaaaaattagctgggtgtggtggcacatgcctgtagtcccagctactcaggaggctgaggcaggagaatcgctttaacccaggaggcagaggttgcagtgagccaagatcgcaccactgcactccagcctggtgacagaacgagactctgtctcaaaaaaacataaatatataaaataacaatattagctgggcgtggtggtgtgcacctgtggtatggttccagctactcaggaggctgaggcaagaggatcacttgagcctaggagatcaagcctgcggtgagccatgatcacacaccactgcactccagcctagggaacagagtaagaccctgtctcaaaacaagcaaacaaacaaaaaaaaagaaatgaaaacctacaaaatgggagaaaatatctgcaaatcatatatctgattagatttaatatccagaatatataaagaactcctataacaacaagaaaacccaatttaaaaatgggcaaatgactcaaatggacagctctctgaagaaaatatacaaatggacaagcaccacatgaaaatatgctcaacatcattagccactagggaaatgcaaatcaaaaccacaatgagccgtggtggcccacacttgcagtcccagcccaggagttcaaggctgcagtgatctctgattgtgctcatgcactccagactaggtggcagagtgagactctacctctaaaaaataataatactttctaaaccacaatgagataccacctcatacctatttattatagttggctgtaataaattttttttagagatggggtcttgctatgttgcccagctgatcttgaactcctagcctcaagcaatcctcctgactcagcctcccaaagtggtgggattacaggcataagccactacacctcaccaaatttttttggttggggagtggggaggtgggggaacagggtcttgctctgtgcccaggctagagttctgtggcatgatcatagctcactgcaacctcaagctcctgggctcaagcaatcctactgtcccagcgttccaaataggtaggactacaggcatgtgtcaccactcctaattttttttttttggagagacaaagtctcactatgttgctcaggctgataatcctcctactttggcctctgaaagtgctgggattacaggagtgaggcatcatgactgaccgatagtaatttttttaaaaatagagacagtaaaaaaaaaaaatagagacagacctgtaatctcaacactatgggaggctgaggcagcaggatcgcttgaggccaggacttcgagaccagcctgggcaacacagcaagatcctgtctctacaaaaaacagaaaaaattagcctagcctggttgtgcatgcccattgtcccagctactcaggagcgtgagctgagaggatcacttgagccccggaggttgaggctgcagtgagctgtgatcacactactgcactccaacctgacaccttgtctcaaaaacaaacaaacaaaaaaggtgcggtcactgtgggaatttatcacttcctgaaaaagctagacagaattcccatataactcagaaattacactcccaggtatacaggcaaaagaattataaacaggtgtaaccacaggaccagttgaatctgattcagtttttttttttttttttttttttgagatggagttttgttcttcttgcccaggttggagtgcaaaggagcggttttggctcactgcaacctccggctcccgagttcaaacgattctcctgcctcagcctcccaagtagctgggattacaggcacccaccaccagcctggctaatttttttgtatttttagtagagatgggggtttcgccctgctggccaggctggtcttgaactcctgacctcgggtgatccacccacctcagtctcccacagtgctgggattacaggtgtgagccattgtgcccagcctggttcaacttttatcagtaacaaaatgatgagttgtttttcagttacaatagatccccaggctgcaagtcacgtaacctaagtatgcccagatgaacaaagtgtgcctgatagctgaccctggtgtcggtgggaacacaaaagtcaaccacaggcaggacttaaccactcaaatggaggaatggacaccaaattaggaagcatggggcgccttgttttgctgcaatatgaacttaaaagccaaagatccagcattgcccctttgcatgacccaaacagatcacaccttgttgtattttcccatctccctcatagttgccttctgcctataaaacctgcccccagattccatcttggggagacaaatttgagtattgcctctggtttccctgctggtcgaccttacgataaagccttttctcaaaaggtgatgacatagtattggcttctatgtgcatctagcagtgagcccactgcttggtaccacaatgggctcaaacatttataagccaatgttcattgcaacattattcaaaacagcaaaaaagcagaaataaccaagtgtccatcaatagatgaataaataaacaaaatgtggtatatacatacaatggaatattattcagccataaaaagaaatgaagttctggccaggcatgggggctcatgcctgtaatcccagcactttgggaggtcgaggtgggtggatcacttgaggtcaagagttcaagaccagcctggccaacatggtgaaaccccatcgctactaaaaatacaaaataagctgggcgtagtggcgggcgcttataatcccagctacttgagaggctgaggcaggagaattgcttgaatctacaaggcagaggttgcagtgagccgagatgacaccactgcactccagcctgggcaacaagaacgaaacaccatctcaaaaataaaaaaagaaagaaagaaaaagaaaaaaatattagccaggcatggtggagcgtgccagtagtcccagctacttgggaggctgaggcatcagaatcacttgaacctgggtggcagagattgcagtgagctgagatggcaccactgccctccagcctgaaaccgagggagatcctgtctcaaaaaaaaaaaaaagaaatgaagttctgacccatgctacaacacagataaaccttgacaacctcatgctcaatgaaataaggtggacacaaaaggacatatacattatgatttcacccacataaagtaattgagtaatcaaatgtatagagaccgtataatagaggttaccaaaggagagaaggacaggaggagaaggggaaataggaagttattgcttaatggttacagagttgctgtttcaggtgatgaaaaagttttggaaattgagtggtgacggttgcataatattgtgaatgtaattaatgccactgagttatacacctaaaaatggttaaaatggcattaaaaaaaaaaagacagtatcttgctctctggcccaggctggagtgcagtggtacaatcatagctcactgcagcctcaatctctcaggctcaagagatcctcctgcctcagcctcccaattagctgagactacaggtgagtgccactacacctggctaattttcttgattttttagtagaaatgagatcttgctctgttccccaggctgatctggaactcctgagctcaagcgatcctcccgcctccacctcccgaagtgctgggattacaagcgtgagccactgcacccagctgcaaatgtttagtacatacatttttaccgtaatttatttaaaaaaaaaaaaggaaaaaagaatacagaagtttgttccttggtctcttcacctcttccagtctctagatccttgtcacatacattaccctaactttgttctataataagcacttatacgccccctttttttgtttgttttttgagacggattttcgctcttgttgcccaggctggagtgcaatggcacgatctcggcacaccgcaacctccgtctcccgggttctagcgactctcctgcctcagcctcccgagtagctgggatcgccaccacgcccagctaatttttgtatttttagtagagacggggtttccccatgttggtcaagctggtctcgaactcctgacctcaagtgatccgcccgcttcggcctcccaaagtactgggattacaggcgtgagccaccgcgcccggcctttccccaaattttaatactttaaaatagggaacatcttacaatcaacaggttgtgacaggttaattagccacgttttatctttgataggtagctctaaagtcaagaaaacccaggcaagatcccgggcaagatcccagcactgccaactgtcatttgtagaccggggataggaacacctgtctcacagattgttacacaatagcgccggtgaagcgcttgtcacaaagcctgacccaggacaatctcaaaaacggagattctgttattcaaattgtttatttttgtgcgctaagtttcacatcaacccaactatctcttgataggttcctaccaggcgctagagatatcttactttcagaaattatttatgatagcagaagccgctggaagtccatagacaacctcatctctctagcggagcaaacagctgggctccagctggccctggcttctgcaactgcgcagtcggcgctgtgacgcccggcgcggctctgtgacgtcacgaatcggtcctctgtaagaggggagggcattcttctccaggggagggctacgtgttgacgccatacgccggggcggggccgagagtttggagccccggagtggggtgtcggcgcctcattcgggtggagctgagccggagacaggtaaccgtgcgctgtcgccgcgcccgtcccagtgccgggtgtcgcggcgcttggcggcccggggttggagatcgcggtaaagggggaggccgccgcgcccttggtgctgcgggcgccgcggtgacaggggagtggagctggatggagtggggctcacggagggtggtaggagggacgggacctgatggatggccgtggcagccaatggagccgcggggcctgcccggcgggcggagattggcgggtacgggcgggctccgaggtcgcgcggggcgcggagcgacgcgccattggcggtgggcgagcggggggcgggcgcggcggcggatgtgagggagagggcggtgcgtccgcaggggtgacccccaaggtcgccgcgggcgtcacgtggttaggccgctctccgacggcgtccttcccgaccgggacgcactctccttcccgcctgtgaggaccgcgtcgctttgtccgaaagacagtgtggcctgctcgagttgcgtcggagcatctrgctttggggtggccctgggtgggactgcctgtttggattaccgcgcagaccttggcgccgcccccacacctgctgccagaagttgggtcgaacagattgaccgagatgaagcttatttctcgtagaaacatctttcaagcaccattttccctcgaaaatatatcagacattggatatgagttgtaatctactgagatttaatagaaaacttgccgcgccctcgccctgacctgggtgcgtcccacctgccatccccatccctttgcccagaacataggacttcgtgttagggtttccttgtgccttgtcttgcagtccgtactttgaggctgatttccaggtacactgctctgaacagctgggtttaggatgggtggcatgggataaagcctttttttgtaaggcagcactagttgcaacagtcaaactgtactttgccgtgtagacctaggagagtatgtaacactattgtagttttgtaaattagctgaggactggatcttgggaagttgaataaagatcactgtatgctcattttttgttgttgttgtcttgtttgagatggagtctctgtcgcccaggctggagtgctgtggcgcgatctcggctcactgcaacctctgccttcctgggttcaagtgattctcctgcctcagcctcccaagtagctgatattacaggcacgcgccaccacgcccggctaatttttgtatttttagtagagacgggttttcaccaccttggccaggctattctcgaactcctgacctcaggtgatccgcccgcctcggcccccaaagtgctgggattacaggcgtgagccactgcgcccggcccctcattattttttttaagcgcacttttcacatttcagttactttttccctttaaataacatctttattgagataaaattcacataccatacgattcacccatttgacgtgcacaatttcggccagtcgtggtggctcacgtttgtaatccccacactttgggagtgtgaaaggaagatcccttgagctcagttcaaggagaccagcctgagcaaccaaagtgatacccggcgtctacaaaaaataaaattatccggatatggtggcatataccacatatacttgtagtcgcaactactcaggaggctgaggcgggaggatggcatgagccagggaggtccaagctgcagtgagccattattgccccactgcactctagcctgggtgacacagtgagatcctgtctcaaaaaaaaaaggccgggcgcagtggctcacgcctgtaatcctagcactttgggaggccgaggtgggtggatcccctgaggttgggagtttgagaccagcctggccaacatggtgaaaccctgtctctactaaaaatacaaaagttagcagggcatggtggcgtgggcctgtagtctcagctacaggctgagctcctccagcctcagcaggaggctgaggcaggagaatcgcttgaacgcaggaggcagaggttgcagcgagtcgagatggcgccacggcactacagcctgagcgacagagcaagactccatctcaaaaaaaaaaggaaagaaaaaactacagtatcatctactttttagatttttaggtaatttttgagatcattgtacaaattattgagaaattcattttgaaaacagtaaaattttaagaaattgtacataaaaatttattctatgcagtcataataaatagtacagagagatcctgtgttcctttcccacttctctaacattgtgcaaaactatagtaaatatcacagccagatattgacattaataaaattcaagatacagaatattcccgtcatcacaaggatcccttccattgcttttttatagccacacccacattcctcccattcccagtccttcaactcctggtaaccactaatctgttcttcatttccctaattttggcatgtcaagaatgccaaataaaaggattcatagagccttttgggattggttttttccagtcagcttaattccctggagaatcatccaggttgttgcgtgttatgggtagttcattccttggccaggcgcagtggcttacgcctgtaatcctagcaactttgggaggctgaggcaggcagatcgcttgagccccaggagttcgagtctgaggaacatagtgagacctcgtctctacaaaaaaaaaaaaaaaaaaaaattagccaggcgcagtggtgtgttcctgtaatcccagctactcaggaagctgaggtgggaggatcgcttgagcctaggctgtggtggctgcggtgagccgagatcgcgccactgcactccagcatgagtgacagagtgagaccctgtctcaaaaaaaaaaaaaaaaaggtacttcattcctttttattgaagccgggctattgggctatggatgtaccacatttggtttattcatccattaaaagacatctttactgtttccattctttggctattacaaataaagctgctacaaaccttcatgtacagatttttatttgaacataaattgacatttctccaagataaatgcccaggaatacaatcactaagtcgtagtgcgtgcttagttattaaacaaatagccaaactgttttccagagtgattgtactattttacattcccaccggcactgtatggtcttgtttctccacatacttgccagcatttggtgatgttactttttttattatagccattccaataaatgtgtagtaatgtctctttgtggttgtaatttgcatttttctgatggctaatgatgttgaacatcttttcatgtgcttatttgccatctgtctattctctctttttttggaagagatgggatcttgctatgttgcccaggctggtcttgaactcctgggatcaagtgatcctcctgtcttagcctcccaaaggctaggatttcaggcatgagccaccatgcctggcccctgtatactctcgggtgaaatgtctgttcatatcttttgttcatttcgtaattagattgttcggtttttgttaactgttgagctttgagaattcctaatgtattctagataccactgctttgttggatatgtagtttgcagatattttctcctagtcagcagcatgtcttttcatcttggttttttttttgtttgtttgtttgttttgtttttgagatggagtctcgttctgtcccccaggctggagtgcagtggcgtaatctctacaacctctgcctcccaggttcaagcgattcttccgcctcagcctcctgagtagctgggattacaggcgcttgccaccacacctggctaatttttgtatttttagtagagacggggtttcaccgtgttggtcaggctggtctcgaactcctgacctcgcgatctgtccacctcagcctcccagagtgctgggattacaggcgtgagccactgctcctagcccttttcatctttttgtttgtttgtttgtttgagacggagtcttgctctgttgcccaggctggagtgcagtggtgcaatcttggctcactgcaacctccacctccccggttcaagcctttctcagcctcccaagtagctgggactacagccgcgtgccaccacgcccggctaattcttttgtatttttagtagagacgggcttttactgtgttagccaggatggtctggatctcctgacctcgtgatcgacacccccttggcctcccaaagtgctgggattacaggcgtgagccaccgcgctcagccccttttcatcttcttaacggggtcttttgcaaagcaaaagtttataattttgatgaggtctggtttaccaattttatcttttgttagattgcttttggtgttgagttgaagaactctttgcctagcccaaattcctgaagattttatcatatgtatttttctaaatttttttttttttttttttggagacacggtcttactctgtcaccccaggctggagtgcagtggcatgatcacagctcaccgcagcctcaacctcctgggctcaggtgatccggtgatcctcacacctcagcctcctgagtagctaagagtaccggagtctgcaccatgcctggctaatttttgtattttttgttttttggttttttgagacggagtctcgctctgtcgcccaggctggagtgctggagtgcagtggcacgatctcagctcactgcaacctccgccttccgggttcatgccattctcccacctcagcctcctgagtagctgggactacaggtgcccgccaccatgcccggctaattttttttttttgtattttttagtagagacggggtttcactgtgttacccaggatggtctcgatctcctgacctcgtgatcccccccgcctcggcctcccaaagtgctgggattacaggcgtgagccaccgtgcctggcctaatttttgtattttttgtagggacgggttttgccatgttgcccagactggtctcaaactcctggggtcaagcaatcctcccaccttggcttcctgaagtgccaggattacaggcgtgagccactgcgcctggccacttttataaaatttttaaattttacatttaaatctatgattcatttagacttaatttcttttttctttttttttttatgttttcactttatggtactttttgatgaacagtttttaattttaatgtaattgatataaatttagtcttgtggccagctttttttgagtcctaaagactcaagatcaaatagatattctaaaagttttaatgtttttttttattattatgctttaagttctrgggtacatgtgcacaacatgcaggtttgttacatatgtatacatgtgccatgttggtgtgctgcacccattaactcgtcatttacattaggtatatccatttggagttaatttctgtatgtggtttaaagtttgagtgttttttggtttttgtggggggtttttgcttatgaatatctaaccagcaccgtttgtttgagaagactgtttttcttccattgaattgcttttgcactttcgtcagaaatcacttggctgtacttgtgtgactctgtttctgattctctgttgcattccattgatctttgtgtctatcccatcaccaataccgagagtttttattattgtagctcataagaagtctcaaaatcggatagattgatttctctcacttctttttcaaaattgtttcagctaatctagttcttttgcctttcttttttttttcttgtgacggagtcttactctgttgcccaggctggagtgcaatgggcatgatctcggctcactgcaacctctgcatcctgggttcaagcgattctcctgcctcagacccccgagtaggtgggactacaggcatgcaccaccacaccctgctaattttttttatttttagtagagatggggtttcaccatgttggccaggctggtcttgaactcctgatctcatgatccactcgcctcggcctcccaaagtgctaggattacaggcgtgagccaccacgcctggccacctttcttcattatacttatttattatttttgaggcagggtcttactctgtcacccaggctggagtagagtggcattatcacagctcactgcagcctctacttccaggctcaagcaatcttgctacttcagcctcctgagtagctgggactgcaggcacgtaccaccacgcctggctgttttttttcttttcttttcttttcttttyttttttttgagacggagtgtcactctgtcgcccaggctggagtgcagtggcgcgatctcggctcactgcaacctccgcctcctgggttcaagcaattctcctgcctcagcctcctgagtagctgggactacaggcacgtgccaccaacgtaatttttttgtatttttagtagagacagggtttcaccatgttagccaggatggtctcgatctcctgacctcgtgatccacttgcctctgcctcccaaagtgctgggattacaggcatgagccactgcgcctggcttgtttttgtttttgttttttgagacagtctcactttgtcgcccaggctggaatgcagtgttgtgatctcggctcactgcaacctctgcctcccagattcatgttattctctcacctcggcctcctgagtaactgggactataggcacccgccaccacacctggctgttttgtttgtttgtttatttgtttgtttgtttgttttgagacggagtctcactctgtcacccaggctggagtgcagtgatgcgatcttggctcaccgcaagctctgccacccaggttcacgccattcttctgctcagtctcccgagtagctgggactataggcgcccaccaccatgcctggctaattttttgtatttttagtagagatggggtttcaccgtgttagccaggatggtctcaatctcctggcctcgtgatccacccgtctcggcctcccaaagtgytgggattacaggcgtgagccaccacgcccggctataatttttatatttttagtcgagatggggtttcaccatgttggccaggccgttctcaaactcctgacctcaagtcatctgcccacatcggcctcccaaagtgctgggataacaggtgtgagccactgggcccagccacctggcttttttttttttttttttttgaagatggcattttgctgttgttgcacaggctggagtgccatggcgtgatctcagctcactgcaacctccacctctcaggttcaagtgattctcctgcctcagcctcccgagtagctgggattacaggtatgtgctgccactcccagctaattttgtatttttagttgagayggggtttctccatgttggtcaggctggtctgaaactcccaaactcgggccatccgctcgcctcggcctcccaaagtgctgggattacaggcatgagccacggcacctggcctagctgtctttttaaaatttttattttttgtagatatagggtcttgctctgttgccaaggctggtctcaaacccctaggcaagctatcctttcacctcagcctcccaaagtgctgggattacaggcctttttttttttttttcttgtgtataatgcaccatttctctctggctgccttcaaggttttggttttttttgttttttttgtttgtttgttttttgtattgagttttctgaatttgtttatgatgtgtcttggtgtgcatttatttgggtttattcttcacggggttctttatgccttttgccagatttgggagatttgtagccattatttctttgaatgcttttccagcccctccttctgccttcatcagggactccaatgacatyaatattagatcttttgttatttccctgaggccttgttctgtcttcaagttcactgatttcctctgtctttattctgccctttaacccatgctaaagcttttttcttttgcttagtgcatttttcagttctgaaatgtctgttttgttctctacatcttctctttgctgaaactttatttttcatttgtttcaagcatgttcatagttgctcgtggaagcattttgaggatgcctcttttagaatctttgtcagataattgtaagtctacgtcatcttggtattggtgtctatagattgtctttttttgtttgaaattatcccggttcttttggttcttttttttttttttttttttgagatgaagtctcgctctgtcgcccaggctggagtgcagtggcgcgatctcagctcactgcaacctcctgggttcaagcgattctcctgcctcagcctcccaagtagctgggattacaggcatgtgccaccatgccaggctaatttttgtatttttgtaaagatagggcttcaccatgttggccaggctggtcttgaattcctkacctcaagtgataacacctacctcagcctcccaaagtgctgggattacaggtatgagccaccatgcccggacaagattatcctggcccttggtgtaaagaktgatctttgacttgcaacctggacattctgggtgttatgttatggactcttgatcttgtttaaatctctaagcaatgcaggcttcctctgctggggcagggaggggctgcttcctcactgttgctggtgcggtgtctggggggagggattccttgttattgctgtatgactgtaagagttccccattaggccttggtgacatcaccctgcctgggaagggaggggtgctgcttcattactgctggatgggattgaaatccagactccctacctggtctccactatcttatcagggagtgagttggaagggctcattattcaccaggtggggatgaaagtccctggtccctattctgacaccagctgagtggagtgaggatatttcctgtggaatttggccgcagtagagcaattgttgtttaaaactttaaaagttttccatcttgctgctcttttcctggtcctttggctagagagaacaggtttctgtttgtagttttctttgtctacacctgttggcatttctgggttgtaggcttctcgagtacccaggtctgaaacacatgaagcataaagaaaatcaagaactcagtgctcggctgggtgtggtggctcatacctgtaatcctagcactttgggagtctgacacttgaggtcaggagttcgaggccaccctggccaacatggcaaaactgtctctataaaaaatacaaaaattagccaggcatggtgatgtgcgcctgtagtagtctcagctacttgggggactgaggtgggagaatcacttgagcctgggaggtccaggctgcagtgagccgagatcacaccactgcactccagcctgggcaacagagcaagaccctgacagaaagaaaaaaaaaaaaaacctcaatgctctttctttgggtcctctggttcctagccagtctgcttccttctctccacctttcacagtcttgttttgtcttaaatgtaacgcctcatgtttttagctatatttagcaggaaacacgttttatatatgctttaatgagatgttgaaaaattgtcctgctttccataaagatttaataatttacactctatcaataccttttaaaagtgcctatttatctacaccctccccagtcaacctgtttataccacatcagtcatgggcatctcagatgctgtggggccacgtctcagggaaagggcagaacagtcttcagacctatatactgaagcgtactcggggatctgatcagggaggtgtcagtccctaccagtggtgaccacccatgattggtgagctaaataggcttctgtgctaaatgatggagacagcctactaatgttttggaagttaccagttgaccgccactccaaattagctaatgtttaggtttaaatatcttggaaacttgaactttttatatcactagtttgccttttttcctaggctacatatatatatgtatatatatatacacatgtttatgtatatatacacatatatatacgtatatacgtatatatacacatatgtatatgtatatatatacacacatgtttatgtatatatacacatatatacgtatataagtgtatatgtgtatatatatacacgtatatgtgtatatgcatatatatatgtgtatatatatgcatatatacgtatatatgtgtatatatacacatatacgtgtatatatatacacatatatatatacgtatatatatatgtatatatgtgagccgagatcgcgccactgcactccaccctggacgacagagcgagactcctttcggagctctggagtctcactctgtcgtccaggctggagtgcagcggcgcgatctcggctcacagtaaccacccgggttcaagcaattctcctgcctcagcctcccaagtagctggactacaggcacccgccacaatgcacagctaatttttttgtagttttagtagaggcggggtttcagcatgttggccaggctggtctcaaactcctgatctcrggtgatccacccacctcgacctcccaaagtgctgggattacaggcatgaaccaccatacccaaccatttctttagtcatagatataccttcaagttttcaaagtgctttcatatttgtgttacaattacaaaaagacattatgagggggttaggagtaattactgtctccactttatggcccaggaaagctcacacagtgacttggtgtcacgtggtctctgttggcccaggaaagctcacacagtgacttggtgtcacacggtctctgtacctgcaggctcaacaattgtttccatctagcaatgaaaaaaaactttacagtttaaaagtaatcctcactacttccctcagcttatatgtaatgaggtgtcactagtgaaagataataaattctttgagattctcagccaataagggagaattgatatctgtactctgtacatgagttctttgtattactactaaaacaaaaataattgcaggcatgagacaacagccataggtctgtagcaaatgtgttcatgattcatcagaagaattgagtctgaaactgaaaaaaagaaagtggatgagttgtcctttaaaatggttgccagctaacactcatagggtttaaggatcatgtaatgatgtgtgggtttttttccctcaaagacttatttactgagaaacagcagactgtttttgctaggtcttgcctttttaatyacccccctacctagccaatgtcatattgataggcgtcagtagttggtttatttccctcattctttgtgccctgggatagggtacctcctacccaactggggaaattcgaggcatagacctcgaaggcttcatatttcagacagaaccctatttaagtatatcgtttcctaagggcagggcgtttaacacctaaaaactaattttcctttggtttttactttttttctttgtacaacttatttttcccaaatgtatgtgtttatttttgcatcttgaaattaatggattacaacttgtatcatttttgtgtacagtgataagttcagttacattttttcttacacattaaaaaaataactttattgagacataattcacataccatacaattcactcatttaaattgtaaggtgaatgtttttcagtatattagagggttgtgacaccatcagcacaatctagttttagagcattttcatcctctcctcccaaaaagaaagccctatgtccattgagttactcctcatccttccctcatttctctgccccagccccaggcaaccactaatctactttctctctgtatagatttgcctattctggaatgtgatattattatcgtatatgggtttttgtccatgattcctggttccatagttcttgttatttcctaagtaactaaaataagsatgtattttgttaaagtatttctccttggttcctgaagtagcttccaaacagcttcagagtgataaaggtggaagtcttttgttacaatgttggggtgctttaggccccagaaacaggcctgtggcactcctttcacctgctgctttttctccccaagggaggccatagaaactaaaaatatactctaatattcctccactgttctgtcttggagccggcaataaagaaattctctgacctaccttgtctgattgtaggtcacaagacacccacttcaggagtcctgcctcacacccacaggaaggaatcctgcacagagaggccaagaagaatctgaacaaacaggcctggctgggtttccccactcggtctgttggtattagatcataccctttttgcctgatcacctatctacatggttatctatgcttcagtcatgcatatccaatgaagtctccataaaaggcccaagaggatggggtacggagagcttctggatagctgaacatgtggagattcctggagggtggcatgcctggggagggtatggaagcctccttaccccatcctacaccttgacctgtgcaactcttaatccacatcctatgttatattctttgaaaaaaacagtagatgtaagtaagtgtttcctgaaatttattgaaccaaaggagggggtcatgggatctccagtttctagctggttggccagaagtacaagtaagacaactgggggcttgcgattgacatcggaagtaggaggcagccttgtgggattgagcccttgacctgtggtatctgatgctgtctccaggtaggtagcagcagaattgaattgcttattggtagggagaattccccacacatttagtcacagaaatcttctgtgttggttgttgtgtgagagcagaggaatagactcataataygtcttttgcgtctgctgctttttactgagcataatgttttcaaggttcctccaggttggagcatgcaccagcacttccttagtttcattgcagaatgctgttatattctatagatataacacgttttgcttatccattcgtcagtgatggacatttgagttgtttctactgttgtttctactgtttcaactgttgttgctcatagcaacaataatgctgctatgagcatttgtgtacaagttttttttgtggacatacattttcatttctcttgattatatatctaggagtgtaattgctgtgttatatggtgactttatgtgtttattggctgttagtatatcttctttggacaaatatctattcaaatcctttacctattttttgattgggttgtctttttactgttgcattatgagagttctttatatattctgtatataagttccttatcagataattgcaaatattttctcccatctatatcatttctttcttaataagttctttgaagcacaaaaattttttgttttgttttgttttgagacagagtctcgctctgtcactcaggctggagtgcggtggtgcgatctcagctcactgcaacctctgtctcctgggttcaagggattctcctgtctcagcctcccaagcagctgggactacaggcatgcatgaccatgcccagctaatttttgtatttttagtagaaacggcgtttcgccatgttagctaggctggtctcgaacccctgacctcaagtgatccgcctgcctcagcctcctaaagcactgagattacaggcgtgagctaccgctcctggccagattttttattttgatgaaatccaatttgtggtttttattttgttgtttatacttgtggtgtcataactaagaatacattgcttgaatcaaggttacaaagatttacttcatggaagttataaaacttctaagtatcttatagttttgtctcttacattcaggtctttgatccattttgaattttgtttgtatatgtctatgcaacttcattcctctttagacgtggaactctagttgtcccagcaccttcagttgaaaagactgttcttttccctgctgaatggagttggcacccatttaaatagaaatattcttttaaagcaagcttgtccaactcccagcccgtgggccacatgtggcccaggacagctttgaatgtggcccaacacaagtttgtaaactttgttaaaacattatgagatgtttttgcgatttttttttttttaaagctcatcagctgtcgttagtgttagtgtattttatgtgtggccctagacaattcttccaatgtggcccagggaagccaaaatattggacatccctgttttaaaccaaaaatcaaaacacttggatattttggacagctcagaggagctttcacaaaaattgtttaaacaattgaatgtctctaccaaataacgtactattcttaaagttgacttagtgtcagttacagaattctaagttgaatttcaagacctaatgttgactggctggcagttttccttctttttgtatttaatatattttgtttgtttgtttgtttttagagatagggtctcgctctgtcacccaggctggagtggagtggcacgatcatagcttactgaagccttgacctcctgggctcaggctatccttccacctcagcctccggggtagctggtactacagacatgtgccaccacaccctgatagcttttaaattttttgtggagatgtggtttcactatgttgcccgggctggtctcaaactcctggcctcaaacaatccttaagccttggcaccccaaagtgctaggattataggcatgagccaccgtgcttggcttttaatatcttcttatgccgttttatgtaagagagaaaggtgaagaatgggtatttaccagaattagaaatgtgcgttagtgttggctctgtcgttctgtcaaagtgtggacagcaaatagctgtcctggccgttcctgggtggagttggggatgttgagccatctgctgaagggcagctcttcccgtgagtcatcttaagggaagtttaaaaatctcagctgggtgtggtggctcacgcctgtaataccagcactttgggaggctgaggtgggcagatcaygaggtcaggagtttgagaccagcctggccaacataatgaaaccctgtctctactaaaaatacaaaaattaaccaggtgtgatggcatgcacctgtagtcctagctactcgggaggctgaggcaggggaattgcttgaacctgggatgggaggttgcactgagccgagatcacaccactgcactccagcctggactacagagcaagactccgtatcaaaaaaaaaaaatctccagctgttgtggcagctctgctgggcagcacttaactatgtgtcagattcagtgactgcggatagcaaaatgtcatgatttacttaaacaggatcatgtggaaggggccactttgggaagaacagatgaaattggtgttttacgattgtcagttcagtgcctgttaattgggctattgcagcaactgaatactgatagttaatgaggtgatgctattgttttctgggagaaaacccaactcagaggcaattgggtatttaatattgccttaataatgacattaaaggaaaaaaatgaacattttcctttgagcctgagaaattaaaaaaaaaatagcataaaatgaagcaacagtagtatttttgctgtcaatgttagggctgtttgtcttccttaaatatatcagtggaaaaacttggagtgtagttggaggtaggaagaactaccgaattaacttaaaacttttgatttctaaagtgaaaacccaggggtaaagattgcattccctaattatatccagaatatattgcttgtttacctttaatttgtaaggagcaagtttttgtttgttgttcagtttgtttttaaagaatatgttctgctgtttacttttgctgacctatctcttctcagtggagcaggccagaggtgaatgcaggacactctaagccctctctcttggtgtcccttaagtgtattctgagcatatttgggccaagaggaagtttctgataaataatatagaagatatttttatgtaacagttatttctgggtaattcacactatgtttcagagcttggattttcttcgggtaggtgtggacatggagtgtagttctaactttacaaccagagcacctgctttgagacaaattcatgagcaaccatgtaggccagcaagcacctttttttccacaggcagcgtccttgtgaactttccgcttggatcctgactctgctgttagtagcctatgaccttggatgaaatgtaagggaatagaaactgaagctatctgtaaagtgaaagagctggtgcctgccttattgggagcctctgggtttatgtatgagtcagatgcgtagagttgctcaccatggagggcccagggtaggcaggcattattgaacaactgctccatgtgytcttttcaatctttgcagaccccacccacgtctcccttgctcagacctggctccccatggcttatgaaagggggctgagtgcagaaggtggcaggcaggacactggacaaccctctgtggcttttccttacccttcgtagtaccatgagattctggctcttcccgtctctgtgtttctgcctatgggtccttccacatgcagtgcctcgtcttccctccttcccatccatgtccttttgtcttcaggcacacccacttggaaggagcccatcctctcacagggtctgctggcatattctgcacctctcaagtactcatatttcctctgcaatcttttctatgttgtttttcctctgctcaagggtaaattgagagtaaggaaagtatttttctaatttctttgtattttccataatattgtaagtacagcaggtactcagtagtttctggacagattagaaaatgttttacttattctccaattaatcctaatcctaattctaaattaattaatccttgttgcctttcttctaattgttttatatatatgtaatatgtaaatttaaagaacatcgtatgtttatcatcttagcccttaaactagatttaatggttttttgttttgttttgttttgagacagagtctcactctgttgctaggctggagtgcagtggtgcaatctcrgctcactgcagcctccacctaccaggttcaagcaattctcctgcctcagcctcccaagtatctgggtctacaggcatgcaccaccacacccagctaatttttgtatttttagtagagatgtggtttcaccatgttggccaggatggtcttgatctcctgacctcgtgatccacccgccttggcctcccaaagtgctgggattacaggtgtgagccaccgagtctggcctagatttaaatttttaagtgaagatggtaatatctgcaactgtgcactcaccttccttgggctcgcacaggcatcctgtgttagtaggtgcaagagtgtgtttcagtttcacacagtcacagctctgttgtgctctcaggcacatgaactggtggcactgagcaggtagcactcttgtgaatacatttataggccagggtctttctcctcaacaattagagttgaacrtgttttgtttttgtttttgtttttctagtagcttttaaaaaaaaattatcctttctctagagcatcaggatctagtagccttgtctcctaaatactcatttttaaaacctttctttcttgtktttttttttttttttttgtacaggcagttgtgaaaaacttcaggacaaaaatgtttcatttaaggacttgtgctgctaagttgaggccmttgacggcttcccagactgttaagacattttcacaaaacagaccagcagcagctaggacatttcaacagattcggtgctattctgcacctgttgctgctgagccctttctcagtgggactagttygaactatgtggaggagatgtactgtgcttggctggaaaaccccaaaagtgtacataaggtaaggctcgcagggctgtgggtctgcctcatgttggtgtgttggcctgttcctgactggtcaccaggtaagtgtgtgcgtcctgaggagtcagcgggcagacaggcagctggagcgccataccaaccaccgtatctgtatcggacccagcatagccccagcagaagccatggtccctggattggcgtccagcagtagacactgtgcttaactctgcgaggatgtgaagaagcatgtgtgtgaccctccagcatctccgcaagggctgcttcaggatgaagccgctgaagaaagaagaaagaaagaaagtgtgtggaaaagagcaggacctcaggaagctcctccattctaactgtctggagaggatactttcatttgtaacatgccgtagtcacctcatgtaatttctgtatgaatggccttttagctcattatgttcgtatttttttcctgtttgtttctaacttctctgtattacatataagggcattttctaaacttttcaccacatgattacygatgtaagtcatgtcttgttttttttggtttgtttttgtttttgtttgttttgttttgtttcagacagagtcccactgttgtccaggctggagtgcagtggcgggatctcggcttgctgcaacctccgactcctgggttcaagtgattcttatgcctcagcctcccgagtaactgggactacaggtgcacgtcaccacgcctgactagtttttgtatttttagtagagatgggattttactttgttggccaggctggtcttgaacccctggcctcaagtgatccacccaccttggcctcccaaagtgctgggattacaggtatgatcaaccacgcctggccatgtcatgccttgtgacagaattcctttattctgttttgagccaataaatatttataggttttgataaccattccttgattttcagggaaagcagccagcctcctgaaggaattgggaagacagtgtagtatagtaataagagggtaggtcccagcgtttmtaagctcctgtgcctcatctgtaggtggttgagagaatgaaaggaggtagcatgagcagggcactcagctcggaggcagtgcctagccaacattgcttatcttcactgtgaatttggcttttttcctactcttgaatcttgggggcttatcaccaaaaggaagtctgcttccactgggctcctgtaaacaagctttccctttaagtattagtgacacttacgaattttttttttwaatttagctaggtgtggtggcacatgcctgcagttctagctactccacaggctgaggtgggaggattgctgaagcccaggaattcgaggttacagtgcgctgtgatggtgccactgcactccatcctgggcaacagagggagaccctgtctctaaaatttaaaagaaggtggggggygggtatattcccatgactgctgggccaccaggtcccattttttcaggaatgccactttgtctcagccttattgcccagatctagcccagtccttccctgtttccatggcaacctgggagcagccttgcttactgggcaaggtgagacctggttttctgtaagaaatctgtagtttatttccctagtctgtaaacaaattgcccagaagaagtgctctgtgaaactggcccctgcttttgatgtgatatcatggatgttactgaagactgtggttgcagattgtggcagatttcacacacacacacccctacacacacacacacacacacacacacccytacacacacacacacacacacacacccctacacctgcagattatatctagaataaaactgagccctgaggtttcagaatcaaggactattatgtgcccaggcctattcttttgccttccttttctcaaacataaccttttcttggaaccaaccaagttgttttcagtgatgttaggatttggagtcagtagctcctaaatgacagtgcctagtgtctgaaaggtaaagagcacctggctgagactgcatgtccttgtgaaggtttggtcctcagtgattcatgggtaaaaggtgcactctgtgagcagtgtggccacagtgctgtggacactgggcctgttgccatcatagctgctcctgctggaagcttttgaagatggtttttgtgggggcatggtggctttatgtctttatgcctgyttctgttgctgggagtctccagggggcacagtgtgggaatcacatgcatgctctgcccctccctgcttgtagaggggaggggacaggatggttaaaagtgggcgtgccctccagcaatcccggttgtcatccagcacggacttcatcactcctctgccatcccagacggcaaggtgggtcctctttaagttgaattgggcccagtatgtggtgtgtgcatgttttttgtttgtttgtttttttgttttgttttgtttttgagatggagtctcactctgtcgctcagactggagtgcagtggtgcaatctcagctcactgcaacctccacctccgaggctcaagcgattctcctgcctcagcctcctgagtagctgggattacaggcctgtgccaccacgcccggctaatttttgtatttttagtagagacggggtttcaccatgttagtcgggctggtcttgaactcctggcctcgtgatccgcctgccttggcctcccagagtgctgggattacaggcgtgagccacggcgcctggccatgtgcatgtttttcaagggagataatccataacttctgtccaaatttcaaagcatctgtcacccatgaaagtttaggatccatagccttagaggcatttcactttatttgtgctcttattttagatcacatagtttaaatagacataataatagtttaaatagagataataaaattagaagtgctgtaggatttagatagatcatctatctcatcttctgtttaaacatcagaaatgtcctgaggtcggattccgtacttattttcagagagcttatggggggctgcaaggactaaactcatatagcagaaaaggaacaaactcagcatcttcctctcctgccctttggcactactttcccattgttgtttttatttttatttattttatttatttttttgagatggagtctcactctgtcacccaggctgcagtgcagtgaggtgatctcagctcactgcaacctccacctcctggttcaagtgattctcgtgcctcagcctcccgagtagccaggattacagatacgcgccaccacgccyggctaatttttgtatttttagtagagacggggtttcaccatgttggccaggctggtctcaaactcctgacctcaatcagtctgcccacctcagcctcccaaagtgctgggattacaggcgtgagccactgcacccagccccattgttatttttaaatctgtgttttatagtgtttccaagcatacataacagtagagagaagagtagatgataagcctaatgaggagactggtcacgcagcttcaacagctgtcttaaaaatctattccctaccccagtgacttttttatttgttggtttatttggggtttgaggagagtagacactggagtattttaaggcaaattccagacctgtgtcatttctggcataaatgcatcagtgtaactaactgttaagtaattgttttcataaccacacccaataaaattaacaggctaattctctaatagaattttttctcagtccatgtttaaatatttactcttctcttaaagctgcccttttacattttgttttgttttgttttttaatttttattttacttttttttacatttggttttacactttataattggtcgttgtattccttatttttaattttatttattttttaattaaaaacttttttttaatgtaagtaggagccatgcctgtaatcctgatactttgggaggctgaggcaggaggattgcttgagtccaggagtttgggaccagcctggacaaggcaaggccttgtctctattaaaaataaaatagaaagctttttaaaaaaataaaaaaatgtaaatagagatggagtctctttatgttgtccagactggtcttgaactcctgggctcaagcaatcctcccagcttggcctcccaaagtgctgggattacagatgtgagccaccacacccagcctcttaaaaaaaacttctattcttaaaatgcttaactgatgtgaaaattatatttgtggtaaaatattttagcaaatcagagctgcaagtaccttttttaccctaagtccactccccagaacagaatccggttaactagctgacctgggtctgtctctgtggtgggcccatctgccatctcccttttgttcctacctttggtcctgtcctagactttcgtctctgttctagtctggcatttgtgctcctcactgacccctcttaagagccttcagcggtggcctgggctgtcagcctatgaaaccctcctcattagggtctcagcatatttgaggtcacatcaaatgatgacatctttatttatgtctttaagacacagtcagagctaagttatccttgttaatgtttaagacaaacaggtaattgagaactgctaagcccccatgagtctgggtgttgatctcattttgttttgtagggacaggtgcccacctacagctgtagcatggtgttgagttccttgtgatgcatctgccaggttctggccctgctgaggaagagccaggattaggtcctgagggagtggaaggagctggggcctgttgttcttctcccaacagtgccttcagcagctgccttgagggtgccatcattggccctgcttttcttctaggccctcctggccatttggctttctcacagcttgctttgtacctcagggctcttcctctgctctgtgctttcctctgccctgcccacctgcctaaagcctgcctccctgttcttgttaactgatgcccatttcttttctttcctttttctttttcytttytttttttttttttttttttgagacgagtctcgctctgtcaccaagtctggagtgcagtggcgcagtctcggctctctgcaacttccgcttcctgggttcaagcaattctcgtacctcagtctcccagctagctgggattacagacgtgccccatcacgcctggctaatttttgtatttttaataaagacggggtttcaccatgttggccaggctggtcttgaactcccgacctcaggtgatccgaccgcctcggcctcccaaagttctgggattatgggcrtgagccatcatgcccggcctgatgcctgtttcttgatggttttttcttcttgcacttttcacgtgtcagctcctaaagtgtgtacatgtggtcgctgcaggagggagggtctctatgcgttcagattacaggtgcaggctgttggcctgctgctgagtctggcatcgctgctcatctgtcgacaccgttctgcttcctcctttcrtgcttatgaaacacagtactggtgttttctatgrgtgaaactaagtggaggaaaagcacagatacacaaactgtcccattatgcagtgttatgggccttttcactctgcagtgttgaaactgccttggcctcactttgaaaaataggactatggtacccatggttgtgtcctggcctggggttcctcccatggcaggagccctgctccaagttaccctcctagccgctgcatgtgcggtgaaggggcttcccacagtgggtatgtggaagtctgatggaagtctgatgtgctcataaggagatctgatatgttcacgtgacaaggaacagctgtgttgaaaaatctgcagaacactttggtgccactcaagttatttatttctgggaataattcacaaggcactttaggcaatgccagttgggtggttggaatgcattttgagtattttaatcttttatgtttgatttatgaatgacttatcagaaatayatgtagtcattccttggtatctgtgggggattggttccagggcacactgaggatactaaaatccaaggaagctcatgtcccttgtataaaatgaaatataaactatgcacgttctcccatatactttaaatcatctctagattacttgtaatacctaatacaaggtaaatgctatgcagatagttgttatacttcattgtttgtggcagcagtccccaactcctttggcaccagggaccagtttcgtggaagacaatttttccatggactgagggatcaggggaggatggctttgcagtgaaactgttccacctcacatcaggcattagttagattctcataaggagtgaacttagatcccttgcatgcacagctcacaatccagttggctctcccatgagaatctaatgcccccgctgatgtgacaggaggtggagctcaggtggtaatgctcgcttgccgctcacttcctgctatgcaacccagttccaaacaggccactgaccagtactggtctgtggcccgggggttggggatccctggtttagagaataataacaggaaaaaaaagtgtwcatgttcagtacaggcagttttttaccaactattttcaatccacgtttggttgaatccatggatgcagaacccacagatacggagggctgactgtatacataaactgcatggtctacgtaaatggggtttcagcgatgagctttgaagttaccccttgatgattttttgtttttgaagattcaggaggtacatgtgtgggtttgtaacatgggtacgttaagtaatggtgggaattgggtttctagtgtacccatcacccagataatgaacattgtacccaataggyaatttttcaaccctcactctcctaccaccctcccccaccgccacttgataatctttaacttcacatgttaagagcaatctcagcacttgtggctttttgtgttaaatcagctaaactgactgagtgcgccttctccaactttagcacagtatttcactcttaagcagtttgcatttatggtttatttagggtgataaaattataacctctttgaaacaacaggaaacatgaagcaacaccctcacttgtgtggtagtttgcagctcatgacagctgtgttcgaagcttgtgctgagtggcggctgcaagaggaaaagcagtcttgccctgttatcctagcaggatgattaaataagtttaaacaacagttaaaaktctagctctcttttctctctctctctccccctctccacccccttccctctttcctttctctctcctctctctcccggcccttaaaaagaaaaataaataaataaaaacatttggaattctaatagaacccactgagcttctgaaaggaagtgcattatgctgtgctgtgaaggagcccarcaggggctcacggtcactcagcaggatgatggatgcaggcttcagggccaggagccagacgcagcaagaaaaaaccaaaaatttggattatgaagtaaatggagaggttccaagatcaaaccaagaggtgtttgttgattttgttatgtgctgtgggagcatggacccctcagcaggtagaaggagagcaagtttgaggatgtggtgcaggaggagttgggatccccaagagcaggagggactgaggccaggacagcaggcatacgaggtcactgaggctggtgggaggagagaggcttactctaaatgaggatcactgcatcttttggagctcttctttttgagacagggtctccattacccatactggagtgcagtggcaccatgatagtagcctcaaacttctgggctcaagtaatccactcccccgccactcccccacgcctcagcttcctgagtagctgggagtacaggtgcacaccaccatgcctgactaatattttatattttttatagagacagggtcttgtttttttgcccaggctggtctcaaactcctggcttcaagccatcctcctgccttgcctcctaaagtggtgggattacaggcgtgagccactgagcctggtggatgttttttgttgttgttgttattgttgttttgagatggactttcgctctgtcacacaggctagagtgcaatggcacgatctcggctcactgcaacctccgcctccccgggttcaagtgattcacctgcctcaggctcccaagtagctgggaccataggcgcgtgccaccacgcctggctaattttttgtatttttagtagagacggggtttcgccatgttagccaggatggtctcaatctcctgacctcatgatccgcctggtggatgtttttaatgattatccttttgtactgtactttaagaaaaaaaaaattttgtttaatgtcagaaattgaaaggggagagagatcaaaaataccttaatggggccaggcacagtggctcacgcctgtaatcccagcactttgggaggctgaggtgggcagatcacgaggtcaggagatcgagaccatcctggctaacatggtgaaaccctgtctgtactaaaaatacaaaaaattagccgggcatggtggcgcacccctgtagtcccagctacttgggaagctgaggcaggagaatggcgtgaacctgggaggcggagcttttagtgagccaagattgagccactgcactctagcctgggcaacagagcgagactctgtgtcaaaaaaaaaaaaaaaaaaaaaaccctcaatgggaaagtagactccaagagtgaaaaggagcaaattgttccagtgagttccattctgtagcacaggtggccacaggtgcttgcctttgaggaaatgaaagagccatgctttgtaagtcagaggcaggctcagcttccccgcacagtctgaagctgggtggcggtgagaaattactaaaaggttagtgccggttttttagatgaagtcatcatgttattaaaaaatagtctgtttagtctctaggttactgttctctggctcccctccccatccaagactcycttggagggaggtttgaggactttgggattctcatatctcttcgcgtccatgattggatcgtgaggtgaggagatagcctttagaaccctctctttgagtggtcagtcacgtggtattccctctgaaaccctggagcagatgctttgtrtagctgggctggggttcccccaaatagggttgcataattattgaggacagatgaggcctcaaccagacgaccacaggtgaccccagactgtgggtcttcctcacctccttgagagttgcaattctgagagctgataaaatgtgccattgtgtgcagatctgggtagtttgaagcgttctcatttcctgaggtgtgtcagaaagactgcgtgagaaaggggtcacagtatcttggatgtcatcttttcatgcagtaaaaagtctggtttccatgaatgtttgtataacaaaccacctcaaaacttggcaccagtgtagcatgtctcatgactctgtgggttggctaggtttccccactcctcccactgccagctcccttggagctgaggctcacaccaggctagaagccatgaaggcctctgatgtgtctggcagtttgtgctggctgttcactgggccctgccatcctccagtaggccggagcgattcctgcacaaagtcccagagtagctccagacagggaaaagaaaggctgtggggcctttgaggcctaggtccagaccgtacactgctactccccacgccattaccttggttagagcaagtcacagacaacccttagggacatccgtttggggagaggaaaaggcatggccactggacagccctccacagctcttttcataatgacctgatagagcagccacctttagtctagtgcagaatcccagcaaatatcattctgatatcagtagattccatagggcagagctgaagcagctgttctttgctaatcttggaagtttattgatgttttatttacacacctgtacagacagaagataatagagattgtttagaaatattctgtcacctataatgactaagcattgctataatggagcatgtggtttccttaattgaagaatacctaaatagaagcccattcttaactggcctcagtataaacagcttgtagtggcaggtcaccaggcctggatcacagtgccctaccttgtttttgcttcataggcagaatggtggtaagtggtactctggcctgggcaaggtctgagcaaggcctgcattgatggagggtccagagtccagctctaccatctgcacattttctttggagacttgtgcttagcccaacagcatgaatcatttgctgaaggctctggaggtgggcattccatccacaagtctccccaatagggagtaccctgtttggacatacagggtagtcacacatatgggttttaaatcttgttcttaggatattttcaggaaaagctctggcccacacgtttaggaccatttcctgggcagcattggaaggagtggtagaggtcatgcaggcctgccctgtcttgtgtgcaggaaaagaatgagttgttggtctacactgaggccgggatgggaggcctgccccttacagcagcgccggctgaactccaggctggctggtcacatggtgcccagcagctgactttttatcagcttggctggattagaatgagctgaaagaagagccatacgccggtgttccttggttacatggtgccctgtagttgatatttatagcaattaaaaagcattgtcagtgtcagaacttagtaagtgaggttgtgtggatagtgctgggcctcatcaacttatcagctgtgcgagggcctttgagcatgggtgtggctccatgcagcaaggagaccggagcctgccccacccgcgccgcggattatttagacaaggtggcagtaatgtggtgaccaagggtagctacgtgggtgggctgggcttgttctgtggctgaggtggagtagggagggcagctggagtggcgtctgtaggggctatggatagatgagaggaagtggtctcatcagtccagagccacccgtagtcatagagcttgggctaagttgtaacactctcctcatgttcctcatcaacttcttgaacaaatgcaagtatatgtgcaaggactttataatttttttttttttttcgagatggagtctcgctctgtctccaggctggagtgcagtggcacgatctcggcccactgcaacctccgactccctgattcaagctattctcctgcctcagcctcctgagtaatggggattacgggcacgcaccaccacgcccagctaatttttgtatttttagtagagatggggtttcaccatgttggccaggatggtctcaatctcctgacctcatgatccgcccgcctcagcctcccagaatgctgggaytgcaggcgtgagccactacacctggccggactttataaattttaaaaagctgcaaatgcaggaccatcatcttaaatagcctgtgtttaggacttttacagacaagaaaacaggccagagagctgaagcaacttcccgaatcctcatgcagttcatgggaggcagacctaggacctggggacccaggaggtggccacagtcagtcctactggtctgtgagtgggcactggggggctgtagagcaccatcctgcatgacaatgggtgtcagctactgctgggggaagggatgtcagatggtatatttgccaccctcagaaataggaagccctacctattggaaacctcacaaccaaggactggcagggagcttggccctcaagactcccaactgctgactcaggaagggcagagtctgctgcctgtagctgccgatatgtgggaacagacaagtgctccttggttaggagtggcacctgctaaggtcagcgcctctgctgcagtgaggggcagccctggactcagactctcccagggtggaaccccatacctgtcaggctgctccctcagaaaggaggctgaatatcatctgaatttaattcagtaaaggttaggtgagcagctgccacatgcagagagcactgaggatactgtttctagcctttcaagagcttcctttgaagaaagagcactggtcactgtgaggaaagtgyattatggttgcatagaattctgagtttgtgggagcttggggagcagtgacttttgacttggaaaacagagcttcatttattacagctaagtgcttttagttacctaaaattaaataggaggtctggtttcatttcatccagaatgtaaaaattatttaccgctgaaatctatcatgtttaagtcatctcagcaacaagttgatgatcttaaacccactcatgggaagttggctgtgagtggggtgggggggcacacaagctccctgcctgcgaaccacccctccctctgatgccatttggtggcaaaagtcagccattaccctggtcaggtgcttgttcctcttgggggtggttagtggttttctccttaatctcccatattctttttcactcacctgcagcctggtcccagctcacctgcccagcctggtttcttaaccrtctgtacaccctgcatgtggcagtatcatgagtctcagcacatggtgggcaggcactggccaggtgctcctgttgtctattctctttggccaaatgtcttctctctcctcctcaggctctgcaggccttaccttgcctttagggctcagaccgtgggcccctcctcagagcatccttgctttcctctcccatcccacttgtcttactcttcgtttctcagcacttggatccattctgtgaatttacacgtttactggtttttcttattcttgttaagagtaagaagctcattttagtcatcttcctgttcacaaaccttacagtatgccacatatagttaatagatatttgttgaattgaatgagaattaytggatttttagaaataatggtattcattggctcagcatcgtgcctcacacctgtaatcccagcccttttgggaggctgaggtgggtggatcacctgagttcaggagtttgagaccagcctggccaccatggtgaaatcccgtctctattaaaaatacaaaaattaaccagacacgatggcggtgcctgtaatcccagctactggggaggctgaggcaggagaatcacttgaaaccgggatgggggttggggggtggttgcagtgagccaagatcacgccactgcactccagcccgggcgatagagccagactctgtctcaaaaaaaaaaaaaaatggtattcattttttgacatggtacatcctgcacacatctgacactcttaggaaaatgtttatgtgtggtaagaacttcatcagaatcccatagccccttgcagggctcagaagttggccttttgggagtgagtgctttcccgcacccctcccctggcccaggacccctcactccttctggcagcttcctgccccttgaatgtcatttacaaccttgcccacttaccttaacattttaaccttttcccccttatcagtgacattgtcattggtggtcagagaattaactgtgtgtaactgtatatttgaggcaaggcaaggggacagatattttccttacgttattagttgtgcaacagaagccaattaagagattggagagatgaataacactagtgatgggttgcaacttgggtgtggagctgggcacacccacgtacgtcattgtgactcagaagtccctgtcaccgccctgagccaagtactaaagtaaggcccaaataccacacttacttcataaagaaaccaaagtctgactgcctccatttctcatgagtgaaaaactgtttctattataggaaacttaggtcttcagtgtgtttgatggtagcatgctattagattgtgtattctcaagtctgattttccccattactgtgctttctccttttcacttctgctttgtcacttggaatgtttctagaagtagaagtcactgcccctgcctacatcagactgcaattccgggacatccaggcaacagcaagggataattaggaataaatttggctggaagaaagggaaaatgcagcttaggcagcctaaaccaacaggcttatttttctcactcagtaagagagctgaggtcgcctgactcagctcaggttctcagtgagccatcagccaccaggtgccacctttcagtgagtgggcttctatcccttccaggtgtctcttcatgctccatgggaattagatgggacatgctttgactctctcttccagaagctttctcttctttttgaaggggcttctgtttgcgctgggtggtcaatgactcagcctagtcttgatttatcccccaggatggggacagacagcaggggagagatctcaggttgagatgagtgtacagtaagggctgggagtatcagaaggggaaacgctctcccagatagtgacaaagctaagcgaccatgtgaagggagaggacaaacatcccatggaaagaagggtagctgccaggcctgcgggaaggaaggagcatgatgctggggcatgggagcaagtggacagggagggctctgcaggtcccctggaacctaaagccaggggttatggaaggcagatccagattcaggtgttcagaggatgaggcaggggtgggtagtttaaggagctggagaagaggtatctccttggggagtggaagatgttagagagatacagggttgcaggacaacagggaggtggaaagagagtgggggatggactgtggcatctgggccccaccaggaaggaagtggccccattggtgactcatacagggaggggtggggccagtgggtgcctgggagctctggtacttgggcaggtctggcttcctgctgccacatctgttgggaggtgaagcctgcaggccaaataatgaccttcattttcaaagcctttttgaataaataaacttttttgaggtttaacttacatatattaaaattcacttgttttaagtgtttagtgcagtaggttttgccaaatgtgtgcagtcactacactcgatacaaaacattctatcactcaattcaaaaaccttttagtatacctccaggtcttggcgcaaagagggcttgctgttgttgggtgtgggggctcacccagtcctggagacagaatgggctctttgtctgaaggtggggcagggtgctcccccagtggtgtgggaactgagccaactggagagtgaagtgggatgcatggtgtaagatgaataagggaaaggctgcagaagttgcattcccagcattttccttcccggggattcccagcagctcagcagtaccggtatgaaccagtttttttctgactgcctccagcatgagctgaatttccgtctgtgcagttatcctcagccaattgaaaatcacctggagttgtattccaagcacaaaagaaggtcagagagtggaggcccgatgatcatgatcgccctgtctccagggcctaggctggaaggagtcctgcagcctttgtggctcaggaccagagagctgaccttgaccctgaccttgtgatcccaggcatcagtggctggaaattcctttcattttattgttgagcccagaagcgcccagctctctttggcaaggttaagctagggtaagaggcactgttactagagtgaccagagttctttaagcgtcgctctgctattactcagttaaccttattaataccctgcctggtgactgctgtgtgtaaattctgcctgagcccacatctctccagtgggaatatgattgacattccaggtgctctaagtaagttggaaaagcccacagagagcctcagtaaaagttagctatacctatccctgctgctattggtgggttttttttgttttgttttgttttactattttaattgttattcaaagctaattttattgaaaagaagtaaacttgtgattttgctatgacttttggctctggatccaaaagtgaatattgtcccctaggataaaggaggctgtctgtacagctggagagactcttgatctaaggtcttgctcttgggtgactttgccctgtgtttctggacacttaatgggttttacgaaatagaagaaaatgttttaggggtttaataaagtttgggttgtgctgttctccagtacttactgggtttgagggtcatgccctatccatgaacctgttgtggccccagggaactaagtaagtgtctacagctagacttggggtgcgggtcacatggtgtgagggtagacattctagcactggagcaagtttggggtaaagaaaaattttgattaggttttttgtgggtttttttttttttctttgagacagagtctcgctctgtcgccaaactggagtgcaatggcatgatctcagctcactgcaacctccgactccctggttcaagtgattgtcctgcctcagcctcctgagtagctgggattataggcacacaccaccacccccagctaatttttgtattttttttttttttagtagagacagggtttcaccatgttagccaggatggtctcgatctcctaacctcgtgatccgcccgcttcagcctcccaaagtgctgggattacaagcatgagccaccaagcccagcctttttcttctttttttttttttttctttttttttttttttttggaaacagggtgtcactctgtcgcccaggctggaatacaatggtgcgatctcagctcactgcaacctctgcctcccaggttcaagcgattctcatgccccagcctcccaagtagctgggactacaggcctgcaccaccacacccagctaatttttgtatttttagtagagacggggtttcactatgttggccaggctggtctcgaactcctgatctcaggtgacccacccaccttggcctcccaaagtgctgggattacaggcatgagccactgcgcctggcctgattaggttttacgtgacagtggtagcttgctgttggttcttgctgtgcaggggtgggatacagccagactgactcctgctcagtttcctgctgtattcaaggggtttctccttttaggtcaggtcctcagttattggaggcctgggtagaggccaagaagtgcagtcattggtcatccctgctttcacaatgaagatggatgtccaatgcatgtggtccccagtcatctctgcttctagaatgtatggagctctcagtcctgctggaaaagctccatgaagtcagaagtacctgagggtgtccagtgtatttgtgcacagccaccttttagatccctgtgtccttgacagaaccagtcatggactgagtgggaggcagcctttactttgcctagggagttgatgctgagacatcctctgttttctctcctaagagtaagtcagttttttcctctggtggaaatactgccttttctcatgttggaggagaacactgagttttcatgagaaccgatttaatggaggaaggtgagaatctctttggagattccaaaccctgggtttctttagcaaacattttgatagcatctgttgaaaaggaaagtttaggcccagatggtggctcatgcctataatccttgcactttgggaggctgagacgggcagatcagttgagctcagaagttcaagaacaacttgggcaacatggtgaaacctcatctccacaaaaaaatatttagtaaaaaaattagccatgcgtggtggtgcgtgcctgtggtcccagctactcaggaggctgaagcaggagaatcacttgagccccggaggtgggggttacattgagccaagatcgtgccagtctactccagcctgggcagcagagccagaccctgtctcaaaaaataaaaaagaaagaaaaggaaagtttgcagccttttttcatgttcctgattgttgggttacatttgtataagatgcttctgtaataggttttgtgggaggtgccagaagagaaccccaaatctgtcttctacatcagacaatacaccagaaattaaccagaaaggtaaaaaccgtaaaacctcaaatagtttgatttgtaaaaacattttaaaggccaggtgcagtggcttacgcatgtaatcccagcactttgggaggccaaggcgggtggatcacaaggtcaggagttcgagaccagcctggccaacacagtgaaaccctgtctctactaaaaatacaaaaattagctgggcatggtggcaggcgcctgtaatcccagctactcgggaggctgaggcaggagaatcgcttgaacccaggaggcagaggttgcaatgagccgagattgcactactgcactccagcctgggcaacagagctagactctgtctcaaaaaaaaaaaaaawttttaaatataattcacataacataaatgtaattatttggcctggtcctggtgactcacaactggattcccatcactttgggagactgaggcaggaggattgcttgaggctgggagtttgagaccagtttgggcaacagagcaagaccctgtttctttaaaaaaaaaaaaaaaaaaaaaaagtcattttttaagtgtaccattcagtggagttttgtttttaacagatgggttcttgctgtattgcccaggccagccttgaattcctaggcttaagtgatcctcctgcctctgcttcccaagtgactgggactacaggcacatgctactacacccagctacagtggtttttagtatgttcacaatactgtgcagtcacatctctggtggttgttttctttaarttattttttctgaataccaaaaaatacatgcttattatagaatgttttaaatattctacaaaaaagaaaaagggaaggaaaaaaaaagtattccacaaaactcccctcaaaaacagatttcactgagagatcagactcccctgcatgaggcagatggtccaggcctgtgcattatcattgtgtcttttctagtttgtgtctagcagcagtatatagcagtgctctyggtagtgggaccatctgagtgacgtacatctgtgccctagccagcattataaaagaacctgtctgaaaaaaacagaagaccttaaggaccagcatactggattctgtagccatctctaccttctggtctccagactcagacagacccatttgatatccagccatgtcccagacaaggagcacatctgggtggcatcttgttagaaggagaatgcaaagatctcataaagttttgccttgcctctccaagtttttcaagacagtcttatcagagtttattgatggaagaattttagaggctggaaaaggtattgcagaaaagaaaaacaatgtttctattttttttttaaactgatgttttgccaggcgcgatggcttacgcctgtaatcccaacactttgggaggccaaagcaagtggatcacttgaggtcaagagtttgagaccagcctggccaacatgataaaaccccatctctactaaaaatacaaaaattataagcctggtggcgtgctcctgtaatccccgctgctcaggaggctgaggcaggagaatcacttgaacccgggaggtggaggttgcagtgagccaagatcatgccaccacactgcctgggcaacagagcgagacttcatctcaaaaaaattaaaataaactgatgtttaattgtgcttttcttttctttttacaatgaacttttgtgaagtcttagtatgtctgatctcttaaatattttaaaaacttgcatctttgtatgagatgaataaaccattacagttcacagtatctgcaaattgtaaatcaaataattcagacatggaatagccaaaaatagtaggaatataagtaaattagtttatagtttttctaaggaaattcaaactgataactaacacctgactttgtgaagtattagactgtgtgctaatgcctttaactagggtagtctttacagcatacctatgaagaatgtatatatttctctcctcatagatgagaaaacagcacagaaaggtaactcactaagagcctacctcttgaatttgaattttgatccctgacacagagatcagatttgaatttccatctctgaccccacactttgagctcttagctcctgagtttctcctgaggtagcaatgatattatttctctgtggggttagtgctgcctcttacaaaggatcaggttccactttgttcccagggaagtgaaaggacatgagcaaggtgaccctgggctcttcacaggttgtgctgagcccttggggccttgagggaggtgtttgatggggtgtttgatcccacagaaaaactggtagagtttgcagacctatagacagaaggtcaagagatcacctcccaggtgctggggccggggggaaggctgagacagtaagtgtctctgttgacctacatcctgaatctgtccccaggcccagtgaataggaactgaggagagctgttggcattgggcctttgggttatgtgtgttgatggaaggcggccacagggcatctgtgttatagctgtgggggtcagaaagtgcatcccgaagacaaaagttgtggaaagcagggagcctgaatgctgagagaaacccaccgtttgggaacagacagagaccccactgtccaggaggaagcaggctcagccagcctatggtagacttgccttgcctgcagagagcagttctctgtggccacagatgcatcctggacttaggggagcagtgaggtaaccctgtaccttctttgtctttagtcatgggacattttttttcgcaacacgaatgccggagccccaccgggcactgcctaccagagtccccttcccctgagccgaggctccctggctgctgtggcccatgcacagtccctggtagargcacagcccaacgtggacaagctcgtggaggaccacctggcagtgcagtcrctcatcagggcatatcaggtaaggcgggtgctttacccgcacacgggaaagggtgcagtgttccttaggtcatgcctcatgggccctattggcctttctgagtgtatgttgtcactttacttawacctcctcaaatactaggtgctttctccctgctttgggaggctaaaaaacaaatacacaagaaaaagaaccaggctagccctatttgagcaaatctcccagcaccactaatgcctgccttataaaagggatccttatttcctttccttccttggcaagaaatatttgtgggcagggaaaacaagtcagtacccgggcatcaaggagaagtgctgcccatctgccagtgagcagtgactgggaggggtggtgcttttgggtggttgatgcccccttctcagttgctaacaactgaatactataagagaagaaaaccatactatagagtttggggatgtggaggcagggagaggcagctgagggtacagctgagcctacagagagtgatgaggggcaggggaactctccaaaagtattgcagttagtggccagtctcgttaggcaagtgttgagcaggacaaggtttttccccccatcctttcccagagcacaataaccaaagtttttctaggatgtccacctgatacatggggagagcctagagttcagatcttaagacttcatctgtgatagttctaaggacgacaggtagagacaagtgagcctggtgcttcccttctggaagctcccatgggcatccaggaccctgccacctgttcttgtgtaactgctttggtggcaacaaggggactcatgtccctgggctgtcttttctctcatgctttggtttctggtggcatgggccatgggcaggtgttgtaatggggcaacataggggaggtcctgggtctctggcccttcatgccatggcctggcaagtaaggctctctccctkgggcaagtgtattctgccttagaaaggagatgcatggagttttgtaaatgctatatgctttaaagtgttatccatgtggatatttgcataaggaggaagcccagtggtgtttctttatcactgcctgcacgcagttggcctcagtaacaacttcagcctgatcttgcagtgacttaccagcagctgctcccttctcaaattgctagcaagaagttgtgaaagaatcttaaattggaagggattttctttctccttttggtttttaaatagttcaaatcagatgctttaagtctgtggtgtagcagggtttttttgttctgactactgtgtgctgacctactcagcagcagcaggaccagagccctcactcctcacggggatatataataaaggcaaaccttctcttagtgagatgacctcttatctgcactcctccccarttaaggccaacacttaagccttcattttcctayttagaaaaatttttctttaaatttgatttattttaaattgaggtgggatctcactgtgttgcccaggttggcctcaaactcctaggctcaagagatcctcctacctcagcctcccaagtagctggaactacaggcatgtgccactgtacccagcaccttagggaaatgtttatgttctgagctgaggcaggcttcacattggagtaagaattgcccagcatatctcatttctgtttatccatggaaactgtataaagatcacaagaaatggatcctttcagactcctaagtttatcataacctgagtttatctcttttttataaaagtacatttatgcacaatagtgcttttaaaataagttattccaagacttttaaaaactaattttgtcgtatgggtttattggtgctgtgttcctctttggaaaaggtttgcataacctgtgactcttttaaccctccccacagctcactggatctgcttaatgacttgcttgtgttattgcttccaggtcaggggtcaccacattgcaaaacttgatcctctcggaattagttgtgtaaattttgatgatgctccagtaactgtttcttcaaacgtgggtgagaattaagctgtaaatgctaattttaatgtaattttactttttttttaccccttccctctttttttttcttctgtccttttgtgtgtgtccttccctctcatcgttggccactcatagatacgagggcaccatgtagcacagctggaccccctggggattttggatgctgatctggactcctccgtgcccgctgacattatctcatccacagacaaacttggtgagggtctgagagcagtcagctgcgttgcttgagctcctctcgctgtgccacgacctgtggtagccaggatgtccaggcaggagggaaaggctcttaagtttcctttcattctgatcacttgaaatttatcggtattgtagccttagtgtgttttgggcaagttatttttatcttactttttcagccagattgtcttaagtctcaaaatttgaaaataaaattttggacagaaaggtttgtggcacagggaaaaagcttgtccacctggggcaggtggatcagaagcacttcagagtatagctcttttggcttcaggttttcaaatgtcagtgcagcactgccttcagtgaggcatgtccatgaggccttgctcaggaactgctgacacagccatccttttctgaagcccagtgtggcctgcccttgactggaggccatgtcccttaggggacgaattctagagcaagttgtgcagttgggtctcctgatttgtaattgctggtgatcacactgaggaaactttggaaggcattcccacagcgtcaggaggtcagggcctttgggaggtgcatgtatggagcacactggggttttgtcacggttgccagaagatagtcccacctacaccccctcctcctcatgaagtgaggtgggtgttgtggctgggctctcacctgcagttgctttgcagagttagtctgctttatgtcactgtgctgctaacctgtactaaagaaatgatgatgtgactaatttttaaatggccagggtgttcacaatagacactgtgcatgctgatgaaattgatgatcacttacttgcctaatactcctcttgggatgggtacgaaattagcctcctcacaggcacttttggggaatggtacagacagtctctaaggctctgcagtgcctggatatctttataggcattactaagttatgtctaggggatgaggcattaatcatcaaacatcattgactttggaattggcattgatggtttgtaattgtttttttaataccagccctttagcggatttaggaagggagtttagagaaatcctcttgaattttattgattaaggccagttcagatggtagactgggcatgagttgaaccctgctttttcattccgtggtgacaactttgtgctcccaagaagagggcctctctttgcagtgtccccggaggtcttggagcctcttccctactgctcaccccttagtacagcaaacctccctgctggcacccccagtcccatcacagcctgtctgccctgtgccyctccagcccccagagacttctagacctgtgggatcctcttcaggtgctcagagcaggccaaactccccagctggtagacttgctgctccctgatgaagagcacagggacttgcatctggaagccacctcttcagaggaaaacctccctctgcatttaggcagggtaggagagctgcggaatgctcattttctgttgttttttttttttttttttttttgagatggggtcttgctctgtcacccaggctggagtgcagcagcataatctcggctcactgcaacctctgcctcccaggttcaagcagttctcctgcctcagcctcctgagtagctgggactacaggagcgcaccaccacacccagctaatttttgtatttttagtagaaacggggtttcaccatgtcgcccacctcagcctcccaaagtgctgagattactggtgtgagccaccgcgcctggctggaatgctcattttttacaagcagcaaaacattcgaacaggagaggagcagatgaagtgactgacttctccctctccttccagaacctgcattgtcccagctctttgtcccaactgtgcacgttagtataaccaggggagctctaaagctctcctctcttccccttcagactaatatcaagaggggccacacctaggtaaacccaacccagcatagtcttttaagggtgagaaaccctaagcactgtcaacatacgcactaatttcccatctcattagtggccgaggcagggccagaatctgggaatctcttcccaggccatcacaaggtcttaccatatatttcactctggaatagtgtcctcagtatttctgtgaggtttgtggttccagattcagcaacaacatcatggtgagggtgagaggacaagaggactttataaaccaagaaactaaaacatacagaagtggccctaaagcttcctgaaatcctttgaggaggaaaacttctgacatctctggccaggagccctttggaaccactgagagagagagtcagggagtagtctccacgtttcaagaggaaggtgcattttaatcctgtggatttgaaatagtgtgacctaaaaatcccactagtcttcaggtacaaaaaatggaaaccgcgtaaacttgttaaaacatttgtatctgtaggaaaattggtctcgaactctcacccttgatgtatgcaggtcttcaagaaaacagcaggtcagatgtgaccgctagacagtttgtagaacacttcaagacccgtcrtctcatttgaacctcagagagccgggactctggagccacactccctgcattggaatcccagcccactattactagctgtgtgaccttgggctagttgcttaacctctctgtgcctcatcacctcatctgtaaggcaggggtgatggtacctacctcctcaggtggtttcaaaattgaataaactccttaaagtagtgccttgaccttaactatgctccaagtgggcttactagcaatcttttgagatgagtagctgccaaactctctgataataagataaattcagaaactgagaggtcaagcaaaaagaccaggaacacacaggagttagtggtgaagactgccctgtagccaaattataaggaagcagcgtagcatctagtgcaggagtttgcaaactaagaagtgaggactctgtatgggggatgtttggggcccaggagaactgtttgccagcttaggaatgaggcagtagaaggggataggctgaatggcaacctggtgacctgaccagtgtgtagacgggtcagggactgttgtgtagtggtgtactgtgtcacatgactatttccccagagctaggattcttgccatgcctccgcttagccgcccttcccacctccctgtggatgcaggcacagtttctccctctccttggggaaacaggctcacagcagtgatcatacccatgttggaacatagcctttggtgcttccgtcagagcttgttctgtcttttgttggaaaagctccaggtagggggcagtgatggagggcaggagccgttggcaaagccattcattctcaaagggcactgatgatgctgccctgaaaacartctgccagctgagcacctgggtggttggccagtttggtctgcagtgcaagcagggaattctgtccactctgagttttttaataaagtggaatatatgctatagtttccactgagttgaccttttatgaccatttttgaaaagtttgggaaatcctggcttagggcacctgtcttcacttctcagaaattctcctggtccctgaagtaataaggaaagataattaacaagtagactcttaccagttaggagagactgtacagacacagaactccacagtagcgccagagtgtcaggatttaccatcagatgttatggacacactcttgccctcagttttatctttcaagtgtagcatgacagaacttgttatgaatacagtaaaaaatattgttgagatggtagggccagtggtttattattattattatttgagatggaattttgctcttttgcccaggctggagtgcaatggcaccatctcggctcactgcactctccgcctcccgggttcaagtgattctcctgcctcaacctcctgagtagctgggattacaggcacccatcatcatgtccagctaatttttgtatttttagtagggaccatgtttcaccatgttgccaggctgatctcgtacgcctgacctcaggtgatccacctgccttggcctcccaaagtgctgggattacaggcatgagccaccacacccagcctaattaaatttctaaaatttaagtagagacagggtttcaccacgttgcccaggctgttctcaaactcctctgagctcaagcactccacctgcctccgcctcccaaagtgctgggattacaggagtgagccaccgtgcccagcctagtgattattttcattaacaatttttaaaattaattttagaacagtttctcaattatgtgtgaattatgttccgtaattgtgccaggtgatggctggaacagagataagttttttttttttgagatggagtttcgctcttgttgcccaggctggagtgcaatggcacgacctcatttcactgcaatctccgcctcccgggttcaagcaattctcctgcctcagcctcccaagtagctgggattacaggcacccaccaccatgcccagctaattttttgtatttttagtagagaccgggtttcaccatattggccaggctggtcttgaactcctgacctcaggtgatgccctcgcctcagcctcccaaagtgctgggattacatgtgtgagctaccgcacctggccagagataactttttaatgaagtgttaaagttaggggccagtttccaggtaaatctccagatgcccatcttaatttgtgccaggctatactataaacctcatttccctggggaaagagggttgagagttccaacatgagatactttatttttttattttattttatttttaaaatagagacagggtcttattatgttgcccaggctcgtctcagactcctgggctcaagcaaccctcctgccttggcctttcagagtgctagaattacagcagtgagccaccgcgcccagctgacatgtattaaatacacatttctcttcactcacattccatagtgaggttccttgacagcaaatttgcagatctggagaatgaggcaccaacctcatgttataatatccctgaatggatccagtcagagtgggaggtagtggcagcccaacgtcttctggtaggagggctcctagggagtctttttccactggctcttgaagaagggtcatcagttggggtaccacggtagatatgggtgtatattgcaaaacactagaaccagagtattatcaatggaaaggtctagacagtgaggcccactcatttgcctaattagaaacagttagaaactcctgcttaattagaaattcttgccctcagttttttcttgctgttgtttggttttttttaattattatttttgttttttgagacagagtcttactctgtcgcccaggctggagtgcagtggtgcaatgtcagctcactgcaacctccacctccaggttcaagtgattctcgtgcctcagcctctcaagtagccaggattacagatgtgcaccaccatgcccggctaatttttgtatttttagtagagaaggggtttcactgtgttggtcaggctggccttgaactcctggcctcaagtgagtcgcccgtctcggactcccaaagtgttgggattacagaggtgagccactgcgcctggcccaattttatctttcaagtgtagcattcgaattagtttcccacttaaaaatgccactgtctgtggtttcggtataaattctgagtataacttttcacagtgacaaaaatgattgagatgtactttactgggttttttgttgttgttttgttttttgagacagtctctttctgkagcccaggctggaatgcagtggcacgatctcgactcactgcaacctctccttccagattcaaccaattctcctgccttagcctcctgagtagctgagactacaggcatgcgccaccacaccaggctaatttttgtatttttagtagagacagggttttaccatgttggccaggctggtctcgaactcctgacctcatgtaatccacctgcctaggcctcacaaagtgctgggattacaggcgtgagccactgtgcctggcctaattaaatttgtttttttttatttttattttattttatttttttttgagacggagtctcgctctgttgcccaggctggagtgcagtggcaggatctcagctcactgcaacctctgcctcccaggttcaagcaatcctcctgcttcagcctcccacataactgggattacaagcatgtgccactatgcctggttaatttttgtatttttagtagagacggtgtttcaccatgttgtccagcctggtctcaaactcctgagctcaagtgatccacctgctttggtctcccaaagtgctgggattataggcatgagccaccacgctccgtgagatgtactttaatgtgagatttaaacataattaaaagagaattaaaaaccaattgtataaataaatgggaagaaagtgtgaaacttctctcccatttaccattgatgtttacaaattgctaataccattttaggaaatgaacgtgagttaaatagttaaaaagtcaatttaaaagttgaaaaatgtggcaaaatgtcaactacttagttcttgcctttctctgacaacctgctgtcattaacagcacagcgagtcatgacaaagtttccacatatcctcctgaccttccagggctctccggtttgttcctttgatggctgagaaaaataagctaaaaatagagttgacgtttaattagcttttgtaatttcagagtgatatagagcagttcatttagtaagcattgattgctatgtgcagcgtgctgtgtgccacagataaccgaggagctggagacgaggtttcctaagtgactcgggagggcggggccaagctaagaacataaccagggtggttgaagccatgggcgatatggtcaccctcaaggagaatgaagctggccaagcagacatctgacatttgagaagattctttgactggagatacccagaaactggtaaaccgagtcccctagttcccagcgtcacattcctgcttctgtgcttcacttggaagtactgtggccaaatctccatccgctccctctctcctccctcacagcacctgcactcttcaagaagtaatttacaatgcttcaaagcactcaggtgttggaaaatctgtgtgctttctgtaaattgtgacaaccagaatatcttctattgttctcttmactctcctcttctttggtttgtgtcttttgtttgccttttattttaaaaatataaaaaagtacagataaaagagcattcacatactcagtactaagaatgtaaacattttaccacattgcctttagatttttaaaaatgggtatgagtatttaaggttcctttcgaggccctcccctgtgtagatccttacctggagtctccagggtagctaacatacacctcacttatggcatcttgacatggtctcatgtcttggttttgaagattgaaggagaaaatttaagattcttcatccttgccttaagcaaaatatcgacatttagatattctgttgtcttaagagccacttggctctgagttcttcagtggttgttgttccctgggggaaggagacagtgtggcttgcccaggactggagactagcccctgtcacagccctaggaagcaggcctgtttcttggggtctgagtctgacttcaaaggaagcacttgctggcctttctctgcactcccagtacagggagcatacccagtgacagcactctgagtgctcaaccatcagcttctctgtgtgcctgtgttactgcctaccttcctgaccccatcccccaggcccacaagcccagacagtaagggtcaggarcatgttttgtgtatccaaataaatgccttgatttcaccagtggctcagaaagctgttatgtatagtagaaatccgatgaaaagtttacaggtagaaggaagtgtacagctgtggagatgcagctgtggctcttgggttgttttcagctagcaagcacttctttcctagtttgccttcttgaaatgggagatcaaggaatccttccattctttagaattcttcaaaatcttacggtttagagtagtctgccacctgaatctagtgctgagaaatatctgctctaaaaattaggctttttcattttcttttcctcaattttcatctcaaagtagtgacttcccaggaaagtgctgttatccgccacttcttgaagctaaggagatgaggagctctcaaatgacgctgcctgatggctttccatcgtcagggtgctaacctcccctccttctgattcaccttattccagctgttctatgaatcatttccatgtttaayaaaattgaccccctgaccatgtaacccacccacttctcccttgatgtgtgtgtgtgtccctgtgatggtgtctgtgctacctgttactgtggtaatggtgtagggttttggtgtttgggtcttttttaaactaactctcacctgtctttttccttctgcgctcacccatgataccccactctgcctctcagatcttgcagttttcaaggaacgacttcgaatgctaacagtaggaggtatgaaaataatgagcttttcaccttttcagagttgaggacttcatttgaataggatgtgcaacttttcctagcatgcaatatggggaaagttgacgcaacttctgtcacgtgtttttaagtttgttaattgttctgaaatgtgtttttcccttcctttaattattaaccaataagtagagctacttatatggtatcgttttgtttctgttcatttgtgtttcaaagagcacttttcatcttcacgtgtgcttcatcgcttcactgtgagctgccatcttcagcataattcacctttagctgctgccatagccagctgggcacatgaagccatgttcagctctgcatggtggcttgtcctgtcctccacattctgtgctgaggctttgactggactctggattcttccagattctgcttcctgggcattttgggcaagatttccaaaatgttttatgtttgaaggccaactgaagtattaataaaaacttactgagaactcttagtgaccctcggttgrgcaaaacacatttgaggaatccagagtcgaaatgctgggggatcatcagcctgttgtcatccaccctggtggccagtctcttctttacactctggcttctctaagcagttatcttttttatcatccttctaatatctgtgaaactctactttttaattacacttttaattttgagattattatagatccatatgcacttgtgacaaataacagttctgtgccctttggccagcttccccagtggtaacatcttgaaaagctatagtacaacatcacaccactacactaaattgataaagtaagactctagacatccatcaccacgaggattcctcctgttgcccttttatgaccatatctacttccctcccatcccagccactacttgtattccctggcaaccactattttgttctccatttctgaaattgtcatttcaggaatattataaatgtagaatcacagtatgtaacctttggggattggcatttttcaatcagcataattttcttagagattcatgcaggttgttggtgtgaatcaatagtttgttcctttttattgctgagtagtattccatggtgtggatgtactatgattgtttttaaccattcacctgttgaaggacctcttcattggaatggattgtttccattctttggctaataggatcttttgcagagcagaagtttttaatcttttttccccctcgtttcctacctcagcttctatgccctaagtttttaagcttgatgacatccagtttattaattttccttttatggattgtgcttttggtatgaagtctaagaactctttccttagccctagatccccaaaatgttctcctatacatttttctaaaggttttatagttttgtgttttacatataaatctatcatccattttgtgtaaatttctgtataagacgtttagatcaagattcttttattgttcattttatatttttgtgtgtagatgtccagttgttctggtgccattagctgaaaactctgtctttccttcattgaattgcttttgtacttttgccaaaaatcagttggacttattggtgtgggtctatatctggattttcagttattttcctttgtgtgtctgtttttccatcgataccacagtgtcttgattactgtagctactaaactttatttttcatttacaaaattgttttaactattcaagggccttttccttctccatataaatttgaggataagcatatctatgtctacatataccttactgccattttgataggaattggcttaaacctatagatccatttagggagaaaatacatttttaccatgttgtcttccaatccatgcacatagtatgtctcctcatttatttggatcactgatttttttaatcagctttttgtagttttcagcatatacattgtgtatatgttttgttatatttacacttaactattattttcttttttaaccttggtgtccacatattcattggtagtatatagaaatataattgattttagtgtttatgttgcattctgagatcccgatgaactcattctagggctttttttttttttttgtagattccttaggattttctatatagacagtcatgtcatctgaaaataggaagttatttcatccttcccaatctgtgtgccttttatttccttttcttgccttattacagtagctacaacttttagcaccgtactgaataagagaggtaagagtggatagccttatgccctgttcctgatctaagggtaaaagcactgagtctttcatcattaagtataatgttaactgtagattttttgtaaatgctctttatcaagctgaggaagttcctctgtattcatattttttctgatagttttaattatgaatgtatattgaattttgtcagatgtttttcctgcattgatatgatcttgtgatttattattattattattattttttgagactgattcttgctctgtcacccagtctggagtgcagtggtgcaatctcagctcactgcaacctccacctcccaggttcaagcaattctcccacctcagcctcccaagtagcagggggctaccagtgtgcaccaccacgcccagctaatttttctacttttagtagaggtgggggtttcaccatgttggctaggctggtctagaactcccgacctcaggtgatctgcccacctcaccctcccaaagttctgggattacagacatgagccaccacccccggccgatttttattctttaatgtagatgatttaatgctaatgtcgtggtagacgatttaatgctaatgtcgtggattgtattgattgagttttgattattcaaccagccttggattagtggaataaacaccatttgatcatggtatataattctctttatatgtctttgtatctgtctctttatatattttgcatccatattgatgagggatattggtcattttctttttttgtactatmtttgcttttggtatcagggtaattctggcttcataaaatgaattgagaagtgtttctcctattttccaaaagacagtaaatagaattggtgttaactcttcttcaaataytttatagaattttccagcaaaatcatttgggcttagaggttagtttttcacaaggtttttatttattaattagatttccttattagccatagggcttttctaattatctgtttcatattgggtgagtaatggtagtttgtgttcttctagaagtggtttatttcatctaagttgtcaaatgtgtgtagtgttatttatagtattcccttatttttgatagtcattttttaaatttctttttcaacttcaagaaaaggaacagaatcttcttgatatttgaagggtctgtattgatatcctgtttcattcctgatattggtcatttgtgtcctctttttatttgtcagtcttgtaagagatttgtcgatgttactaatcttttcaaagaaccagttacttgtttcattggtttttttctgttgttttgctgttttcaatttcattgatttctgctctttattgtttccttacttctgcttattggcttttggcttctttgttgtttttccctcttttctaggaatgggaacttagattattgattagagactgtccctcttttctgatgtatttactactataaatgtttctctcagtactggtttagctgtcctacaaagtttgatatgttatattttcattttctttcagttgtttttgaggcaaggtcttgctctgtcattcaggctatagtgcagtggcatggtcacagctcactgcagcctctaattcctgggcttaagttatcttcccacctcagcctcccaagtagccaagactacaggtgtatgccaccatgcctggctatttttaaaattttttatagaggtgaaatctcactgtattgcccgggctggtcattattgtattctttgtataccccttgatattttgtctttggcctttggattatttagaagggtgttatttagtttccaagtgtttggagatttcttgttacctttcttattattgctttctagtttgatttcattgtggttggagaatgcaccctatatgatttgaattgtgctaaatttgttgggtttttaaaaaatggcccaccatattgtctgtcttggcatatgtttcatgggtgcttgaaaagaatgctgctgttgaaatgctattgttgggtggagtattctctaaatgtctgctagagccaggcatggtggttcatgcctataaacccaggactttgagagaccaagatgggaggatcacttgaagccaggagtttgttgcctggcaacatagcgagacccctgtttccaccaccaccaacaacaaaattagccaagcatgatcgcgcgtgcctgtagtcctagccactcaggaggctaaggtggtaggatcatttgagcccagaagtttaaggctgcagtgatctatgattgcaccactatactctggcctgggtgaccctatctgtaaactacacacacacgcgcgtgtgcacacacacacacatctgttagatcctgttagttaatggctgttgagttctgtatttttgctgaatttctgtctagttttttagtcagttattgagagaggggtattaaagtcttcagctataaatgtgggtttgtctctttctccttttagtcctatcagatttggggtcacttattttgcagctctgttctttggtgtatacacatttcagattgctgtatcttctcagtagattgaccctcttaccatgatggaatgtccctctttgtctccagtaattttctttgctctgaagttacttcatctcatattaatataagccattcctacttacrtttgattaatgtttacatgatgcattttttcctccctttacttcaacttgtctatatcacatttgaagtgagtttcttgtggataagcatataggtgggttttgttttatatttatccacttttctcataatctctgtcttctatttaatatatttaggtcatttatatttaatgtaattattggtatgttagggctcaagtgtgccattttattatttattttttgttctgcttttcattgctttgctttcattttcctgtgctgtggatttttaaacccacatttaaaaatttttttttaattatgtatagtttatggttttttgggtttttttttgagacggagtttcgctctttcacccaggctagagtggtgcaggggcgtgatcttggtgcactgcaacctctgccttccggttcaagcgattctcctgcctcagcctcctgagtagctgggattataggtgcctgccaccacacccagataatttttttgtatttttagtagaggcagggtttcaccatgttggccaggctggtcttgaactgacctcatgatctacctgccttgggctcccaaagtgctgggattacaggcgtgagccaccacgcctggcgtgtttttgagtgtatccttttatatagcatttttagtagttgttttaggtattactactttatatagacataacttatcatctactagtgtcataacttttcaatacatattaagtatggaaaccttacctccttttatatctctttactgtcctgcatttataatataattatcttagatattttctctacatacawttagaacttcatcagacagagttataagtttgcttcaaccatcaaacataatttagaagacccaagaggaggagaatctgatgtatttacccagatttttgctttttgtgttctttcttccatcttggtgttccaagattccttcttttattgtttcctttctgtttaaaatacttcctttggccaattttttagggcaggtctgctgatgacaaacttagttttcctttgcctgggaacctctatttctccttcattcctacaggacatttttggtggatgtaagattctggttagacataatccttttcccttwtctttcaggtcctgaaaagtgttgtgccatttctttcttttcttttcttttcttttttttttttttttgagacagagtctcactctgttgcccaggttggagtgcagtggtgcaatctctgctcactgcaacctccgcctcctgggttcaagcgattcttctgcctcagcctcctgagtagctgggattacaggcacgcaccaccacgcctggctaatttttgtatttttagtagagatggggtttcaccatgttggtcaggccggtctcgaactcctgacctcatgatctgccccacctcggcctcccaaagtgctgggattaccggcgtgagccactgtgcccagcctataccacttctttctaccctccatggtttctgatgagaactcctgtcatttgaattgttttccctataggtaaagtgtcactttacaacaactgcttttaagattttttctttgatattgtttttcagaagtttaattatcatgtgttttggcatggatttctttgggaatatcctgtggattcactcagcttcttgaatctttgggtttggtcttttaccatatttgggaagtttttagctaagtaccttttcagccaccctctttattttctgcttctttgattttatccatttatatgtatgtgaaatctttgattatactgtcacatgtcccctgaggctctgttcattttttatttcctttctgttcttcagattggttaatttctgttgttccgtcttcaaatatactgattctctgcccctccattctgccattgagcctatccattgaatgttttttgattttttaaaaaaattctatttggtactactttgcatcttcagtttttggctgagacattctaatttgtaactcacttttaaaaatttgtctctatcgtgttcttaattgctcattgaaattgtttgggccaggtgcagtggcttacgcctgtaagcactttgggagaccaaggcaggcagattgcttgagctcaggagttcgagaccagcccggccaacgtgggaaaactccatctctattaaaaatacaaaaactaggccgggtgctgtggctcacgcctttaatcccagcactttgggagactgaggcgggcagatcatttgaggtcaggagttctagaccagcttggccaacatggtgaaaccccgtcgctactaaaaatacaaaaattagccgagtgtggtggtgcacgcctgtagtcccagctgctctactcaggaggctgatgcaggagaattgctcaagcccgagaggcggaagttgcagtgagctgagatggtgccacggcactctagcctgggcaacagagcgagatgctatctcaaaaaaaattacaaaaactagctggacgtggtgttgtgtgcctgtagtcccagctactcaagaggctgaggttggaggatcacctgagccctggaggttaaggttgcagtgagcagtgatcaaaccagtacactccagcctatgcgacagagtgagaccctgtctcaaaaaaaaaaaaagaaaaaagaaattgtttgatgatgactgttcaaatcacaggcgattctaacatattggtcatcatggtgttgatgtctgttgattttcttttctcattcactatgagatattcctgggtcttgttatgaattatagtttattgaaaccaggacattttgggtatggtgagagtcaggatcttatttaaatcttctgttatagcagaccttttgtagacactgttccccactgtggtgggggaaggggagggcaccaccttgttattgccagcagaggtggaagtccttctcccactcaagtatccaccgttactgggattaggggaaggggctgatgcattacctcccagagagaaggacattttggattccctcttgggccttcgctgaaacctctgtgatggggttgggtgctagggcccattacagcctggtgagggtggggtcacagtgttttctctggtatttgcctgtagtagagcagtttttgtctaaaagttttttgtcttgataggctacctctttcctggtcttttggtagagagcagcttttgtcaggcttttgttatcaaatacacctcttaaagttttggggttgctggttcttctgctccaggtctgcaatatttgaagcaaaaaagaaattccagggaactccctggtgtgttttgccttgagacctccctagctggtgtgccttattctctccacctttcagagttgtcttatgattkttttgcatataatgtctaggatttttagtkgtacttattgggggaatagggaagaatatgtgtactccgctttcacaaagcactcatatatagatctagtttctcaaatagctaaagaactaaaagtgtaccagcagttctgaggctcagcagtatagcccaagaactatgaactcaggatgatagaagtgaaagaccatcacatggtgaggtcaagggatatctgtaggcacctacttcacagggtccatgctgaaagactgcaaccaatacacagcgcttatctgggggcatacactggaccgatatagtttcacaatcaaaatatttcccaacaaaatgtgcactgttattctggtccccagtcagctgcacctggcctgagttttttagtcaggaaaaatttctcaaagatgattctgtttttcctccataaatactatagggcaattgcccaaaagccaggccataaatggcaagagccacgtgcttcacctaggcccaagtggttgctgtgccctcagtgttgacagactaacaggagggaatgggtgttcaggcttaactaagccactactaccatcaccaccctccaggttaaaaaaaaaaaaaaaaaaaagccagatttgctttgttttaataaaacaaacagggcttggaaaatgtagagtttgcttttaagacttaaaaaacaaaacaaaacaaacaaaaaaaacctctccgaaagcattagataaataaaggctgtagttcccaaaccatgcttgaatcagaatcaccttgggagatttgtgggcccaccctgagactcactgattcagtaccagggttggagcctagaaacaagcctttttataaatctccaaggagatcaaaatacacaattgtgtttgcaaactaccaccgttaatcccgtgctggacacttatggctccttttagtcttaatttggccaggaaacaataagaacatttcatcaggtctagtcagatgttggagacttcgcaraataccagttcactgtgcattcctggagcctgagaaaatgctgatgtaaggtattcaagcgctagtgattcttgaactgtgctttttgctgtactctagctgatatattatgtcaggagagatgccaaactggataaaagaatgtatggtgtcatttgacagtcttcctctttgatacagcaagatgaaacaagcatataatgccacagaaagagctcttccagcattattctttctcagactgagatgcactttcaggtgaggtgttgtcttcccccacagtgctgcagcgaatattagtgcttactcagttggttcccgctgagtgattggagtcaggagatgggagggttgtacctgtgactgctgagtattgcctgcagaatgggctcagaacgcatagttcaggaatttcaggagaagacgatggtccttaatccaaggctgggggttgtttgcacgctgctgtgctgccctgtggtgcacccctgcctggagctccaacagacaagttgacttctggtgactgtttctccttcacttcttagtccccctcctccagctttttgacattcaccacatacatatattattgtcatatgatctgttcttctatatcagttcttcattttctactttaattcctccttaactattgtactgatttttgattgacttacccagtgccttttcatggacctctcttcccacccccaaaattggttatctttgggaccttgaaataaatttgtctctaaattatgaataattggtgtacttaactaacttatgcataatatgaattttattgtgacttacctgtcatactctaatagcctcagcttctatttattgctaaagtttgtgtttctggctgtaaaatattacttatttcacatatatcaggggctttttatatgatttttttcttctctttttgctcacctggggagttccttcccctttccataaactgtggtccctgcatggctgtgccccatccctcctcatctggcttgtcctgcccacatcgccctgcagggttctatggcctggatgagtctgacctcgacaaggtcttccacttgcccaccaccactttcatcgggggacaggaatcagcacttcctctgcgggagatcatccgtcggctggaggtaagagcagtttctggaaaaatctaatggacttcttaagaacttgtattggcaggatggctttgagactagttttattttttttctttgtcctatctttctattttattttttctctgagacagagttactgtcacccaggctagaatgcagtgacacagtttggctcactgcagccttgacctcccagtctcaaaccatcctcccaccccaacctcttgtatctgggactactggtacacaccaccatgcccagctaatttttttttaattttttattgtagagatgaggtgttgctgtgttcctcaggctggtctcaaatgcctgggctcaagtcatcctcctacctcggcctctcgaagtgctgggattacaaacatgaacctgtctgtctttttaaaaattgtaagggaaggaggacttttgtggctattgttgccattttatagatagaaaccagtggttttgtgatcagccatagagaggggaagtaaattctgctttcagatcccactaggagtttattacagatggaaggagagtcacttcaaccctgagggacaggcctcaagtcaggggtggcttcgtgcacagctcagtgtcagggctgctgagtggtggccactcttctttcctctctccctctgttcctctcatccttgtgttttgtttcatttttttccttctctctggactctgttagtactaagcctgccaggaaattctttcattcacacacattatagacagtggctaagagttgtggctctgctgttaggctacctgtgtctagttcttccatcctgggcaagtcatagcctccctcagtataagggtgacttctatgcccattgcagaggggagaatggatttgatgagaggtgcatgccaagagttggctattactgttacttaatgctgttcctggtattcagagctaaaggatcgaggttaaaataaactgaggaaataccctggaatggggaccctcagaattgagtatatatatcagctggggtcctgcctatcatgcagagtctgaatcctgacgtccctaactaacccaggttgaaccacactggccatcagggctctctgaggctgttcctctcatggctggacattagaaccacctggagagcttacagaactgatatccaggccacagcccaggtcccctaaatcagaagccctctagcaccccagggattaatgcttgctgccgcaagtgaattttaatttaaaactctcttgtcagtgtttccagttggctgcacagtggcttaaaaagatctgagtgtccaggccaggcacagtgtctcacgcctatagtcccagcactttgggaggccgagacaggtggatcataaggtcgggagttcaagaccagcctggccaagatcgtgaaacgccatctctattaaaaatacaaaaattagcggggtgtgatggtgggctcctgtaatcccagctacatgggaggctgacgcagataattgcttgaacctgggagcgggaggttgcagtgagcgaagatcgcgccactgcactccagcctgggcaacagagcaagactccatctcaaaaacaaacaaaaaaaaactgagtgtccagtgctggcattttctgtagtttgtgatgagcatcctgaagtattgtcagcatctcagcttggagctgcttcaccgcctgccttcctcacttgttgaggagaaaggggtagaaaccagaactatgtgccagcatcagaagcttgtggccagtgggatgtattgggcaccaggggggagtgataaggattaatccaagaagaatgaacctttgggtccttcctgtcacctttatctgcacccacatcaccacactgacyatagtttctagttctgcctactagccacatgttactattgagcacttgaaatgtacaaaatatttgaatgactttttaaatgttgaaaagataatgtttgatacatcgggtcaaataaaataggaaaatttcatgtgggtctactagaaaaacaaattacatatgtggcttacataatgtttctgttgaatgttgctgatctgtgaagttcttgtgttgcctggaccccccacaaatggcaccccatatagcttctccaagtggccctacccccaagttatttcactgctcatgtgttccacccagttccttcagtgtattttctgttacaacagccatctggtgataccagcctgtgctgagagcagactcagcactagtaccttttacctcagaggagtcccctgtggggagcccggcagctttttttttttttttttttttttttgagacagggtctcactctgtcacccaggctggagggcagtggcacaatcatggcccactgcagcctcaacctctgggattaaccaatccccctacttcagcctcctgagtagctgggactataggagcacaccaccatgcctggctaatttttgtattttttatagagatgagatctcaccacgttgcccaggctgatcttgaactcctggagtcaagtgatcctcttgccttcgtctcccaaaatgctgggattacaggcatgagccactgctcctggccccagcagctcatccttaaacatgctctcacattggaaagctcccatggagtcactgtctccatagcacgtcacagtgtcacctctcaggggcctgttcaggaccttccttcccagagagcataggcattgatgtccctatggctaacttcctatctgaatcttgaatcccaggtaatttcgatttcatcatatgaagggggtggagggcctgaagcacattgaagggctgcctccctttcagtccagttgatgccagagccttggagttggctcttgttgtctgagatggttggacctgtacccaggagtctaaggctgtangcgctcctggccccagagcagccccaacttagaagactccattttcacracagtttacagacatttgcataaagttctcattgccctgcctgatggtgatgctttacttacatttaatgtgtgtgtatgttagattggtgatataatcagacagatcttaagctattgatcacgtgatgtggtggtcaatttgtacctttttcaaaaattagaggaaattcaacttattggcttcctaaaaattgtctcattagagggaaaaacaaagaatcagcccctgaatcttgctgcccttttctcctggagacagggccaagaacaggaaaaacacagcatgatctagtggcccggtaactacatctccaagttaattgttaaagtaatgctgatgttggagagatactgatttctagagtttttaacccaatagtttcttctgttcaataatggaaattctgccaccgtcaggtgtaaaagggagagaggaaaggcatgggcagagcctgggtagcacagttctgccagctctgtaattggaaacagcagtagtgatgaagggaagagtccttccctcacagcacccctcaccagtgggtcatttggggtcgtgatgatgaagaagggacagatagccagttactgggtttgcaactcaggcatggaccccatccaaagagggtaggtcctctttgaaggttctcattaacagccactctggggctggccatgtcttcttgaatgggtttctgcagaaatgtagtttcttctgctggtcagtaccttgggcactatggatccccaagtgtctgtaaagttgagatggtacagtggactgatgttgactctgaaattagggattagggggccaactacaccctcttcttgtattttttgtgcatctaatttagaagttcatagttttatcttagatgtgattagaaaatatggtttgtggggccgggcgtggtggctcaagcctgtaatcccagcactttgggaggccaaggcgggcgaatcacgaggtcaggagatcgagaccatcctagctaacacagtgaaaccccgtctctactaaaaatagaagaaaattagctgggcgtggtggcgggcacctgyagtcccaactactcgggaggctgagccaggagaatggcatgaacccgggaggcagagcttgcaatgagccgagatcgtgctactgcactccagcctgggcaacagagcaagactccatctcaaaaaaaaaaaaaaaaaagaaaagaaaaaaaagaaaatatggtttggggttgtcttagtccattttgtattgctataaagtataaaggaatatctgaggttggataatttataatgaaaaaggggttatttggctcacaatctaattgggcatctgcatttggtgagggcctcaggctgcttccactcctagtggaaggcagaggggagcctgcttgtgcagagatcacatggtgggaggggaagcaagagagagtgtggggaggtgccaggctctttttagcaaccagctctctcaagaactaatagagcaagaacccactcacctctgagcaagggcattaatctattcatgagggatccaccctcacaaacaaaacatctcccatgtggccccacttccaacattggggatcaaatttcakcaggaggtttgtgggggaacaaacgggttaataaaaatatcttaaatagccgggcgcggtggctcacgcctgtaattccagcactttgtgaggccgaggcgggcggatcacgaggtcaggagatcgagaccatcctggctaacacggtgaaaccccgtctctactaaaaatacaacaaaaaaaattagccgggcgtggtggcatgcacctatagtcccagctactcgggaggctgaggcaggagaatcgcttgaacccgggaggcggaggttgcagtgagctgggattgcaccactgcactccagtctgggcgacaaagcgagactgcgtctcaaaaaaaaaaaaaaaaaaaatgccagacgcggtggctcacgcctgtaatcccagcactttgggaggctgaggcaggcggatcacgaggtcaggagatcaagaccatcatggctaacatggtgaaaccctgtctccactaaaaatacaaaaaattagccgggtgtggtggcgggcgcctgtagtcccagctacttgggaggctgaggcaggagaatggtgtgaacccaggaggcagagcttgcagtgagccgagattgtgccactgcactccagcctgggtgacagagcaagactccatctcaaaaataaataaattaattaattaattaaaaaaaaaaccttaaatactagggtctttcccagcagcactttctcttttagttcctaggcaagatttttcttctgttgacttggataataactagagtattgtggttggccataattttgagtttaggcaaagtttgctttgtttcatggtcacggagcttgtgtacagggatagcccaccctcctctgcaaagaacagggctggtctcagattcagcacatcctttaactgctcatgccagctggtctcattgtctgttgtgaaaaccaagtggggtcatggatgagagctgctgagcaggacctaacactctaagtactctggcagcagtggctgctgtaaaggcagttagaggaggctttgggggtctgtaaagtgtctgttggcccacattagggcctatcttctttttattccatgctgacttgcagtttgctctcagactctcattctggtcctccagggcagctgtgcaggtcgagttttgggcctctgcaggagtaccaggatgagggcagcccgagagggatttctttttgttttttgttttttttttttttttgagatggagtctcactctatcgcccaggctggagtgcagtggcatgatcttggctcactgcaacctccgcctcctgggttcaagcgattctcctgcgtcagcctcctgagtggctgggataacaggcacatgccaccatacctggctaatttttgtatttttagtagagacggggtttcaccatattggtcaggctggtctcaaactcctgaccttgtgatctgcctgcctcagcctcccaaagtgctgggattacaggcgtgagccaccgygcctggccccgagatggacttctaagagcctggtgcctcctctcgctcctggcacctctcctcttcctgaattcctccctgccgagctctgcagatctggatgctgcttcctcacccagctgtgcagtgtgaacgtggtacaggacatcttgatctgctcaggatcctgacttttgtcttatgggcaatcttgcttcctgaggcagaaggatcatttgagcccaggagttcaagaccagcctgggtaacatagtgagacctcatctctccaaaaaattcaaaacatgaggcaagaagatcacttgagctcaagaggttgaggctgcaacgggctctgatagcgctactgcactcccgcctcgatgacagagaccctgcctcaaaaaaataaataaataaataaataatttttaaaacctgcaaatctttaacagccattgagcctatgacaccctatgggcatttcctgtcatgggtgctggtacaggtctgaccttgatgacagcctgtcttccctggggaaggacccagttccacaactgttgcggtctgtgcttcttgccacaaaggtaacagagtagaactggggttgtcccttggcctgcccttggaaggctaggaggttctctgtgtacaagtgacccaggtccctgaaggaagcacttcatgaccctatgaagagggcttctgcctggcacccactccatcccatcctcagtcacacttgattggrgtacatttcagaacaagcctcctgcttatcccctccttctggctgaatgggcagtcggcagtcttcattcagccaggcctggttagaaatccccttgactgtgtgtttctgtatggaatagatggcctactgccagcatattggggtggagttcatgttcatcaatgacctggagcagtgccagtggatccggcagaagtttgagacccctgggatcatgcagttcacaaatgaggagaaacggaccctgctggccaggcttgtgcggtccaccaggtatgggtctggccctgggccatggggcagacattcccagggaagcagtgaccctgtctgtgttgatcgggcctgtgtgcagcctgttggccgaggtgagagggggtttggggtggtacaggcaaagctccatctgcacatgtgtgaagaracaccagacaagtagagtcagccttcagagcaacctccgcctcctgaattcaagtgattctcttgcctcagcctcctgagtagcagggattacagaggcacaccaccacggctggctaatttttatatttttagtagagatgaggtttcaccrtgttggccaggctggtctcgaactcctgacctcagctgatctgcccacctcggcctcccaaggtgctgggattacaggtgtgagcctccatgcctggccagaatcccctctttttggtcaggaagagtgacrttgcccttcaaggtggcttggttccctgtccaggtttgaggagttcctacagcggaagtggtcctctgagaagcgctttggtctagaaggctgcgaggtactgatccctgccctcaagaccatcattgacaagtctagtgagaatggcgtggactacgtgatcatgggcatgccacacaggtacagccaagggcgcgcccaacctggtttctcaccatccctgtgggctgtgtaggaggcaccaggtaaaggcactgagagagcagctgtttcctccttgagtgccagttgtgagtctgggctcatctggtacctgagggtgtattgctttgcaggggattctcacattgcctgcctctggaggactgcaaagtcatggtcacctccaaagccacatgtagtttcagactggcatttggccttacagtgcatctttatgaaaattaaacccaagttcccttgttggggtctaacctggagggaaggctgcttcctgacattgaaggggaggccaagactgtgaaaatagggaaggygtggggagggagaagggtaaggaagcctcaggcccatggcattgctgcatcttctatctttctgctgcccactgtggccttgattgcccagcacggagaggctcggttcccacattagctccagtttacagctatccttgggctgcaaaccgaggaggtgccgtgtcctggggggagggggagggggggattgtaacaccctcatctgccatctggaaaccatgacctcaggctctgctcaccctactcgcccatacgttccagagggcggctgaacgtgcttgcaaatgtcatcaggaaggagctggaacagatcttctgtcaattcgattcaaagctggaggcagctgatgaggtgaggcacctgcatagagacacatccagcatagccccaacttacacaagacccctggctccacttctttcttagaatgacttacggggggttggttcttctgtaccatttgtgatttgccttccttgttgggagaattttagtgttgggacaaaggtggccagtggcccacctcctggtcagaggtccagcagccccactctgagtgcaggggtgtgtcccctctggctgagggacgttctccttatgccctggatgggaatgatcctgggaaaaggcctccatatccttctgcgttgggttcctgggagtagaaatcccatataaggctgggcatggtggctcacatccgtaaccccaacactttgggaggctgaggcaggcggatcacgtgaggtcgagagtttgagaccagcctgaccaacatggagaaaccccatctctactaaaaatacaaaattagccrggcgtggtggcgcatgcctgtaatcccagctactcgggaggctgaggcaggagaatcgcttgaacccagaaagtggaggttgcagtgagccgagatcgcgccattgcactccaacctgggcaacaagagcgaaactccatctcaaaaaaaaaaaaaaaattcccgtataaaagggctcttttggagactgagcatctccttggccagggtgcaaattcactgtttaccccatcagggctccggagatgtgaagtaccacctgggcatgtatcaccgcaggatcaatcgtgtcaccgacaggaacattaccttgtccttggtggccaacccttcccaccttgaggccgctgaccccgtggtgatgggcaagaccaaagccgaacagttttactgtggcgacactgaagggaaaaaggtaaggcccagagagaggcgtgcaaggcagatcgtcaaggccccatgttccagcatggagttccgctcaccaacataacccagagccctgggtgcatctagactttaaaaaaatatttaaagtcggccgggcgcagtgtctcacgcctgtaatcccagcactttgggaggccgaggtgggcagatcacctgagttcgggagttggagaccagcctgaccaacatggagaaactccatctctactaaaaatacaaaattagctgggcgtggtggcgcgcgcctgtaatcccagctactcaggaggctgaggcaggagaatcgcttgaacccgggaggtggaggttgcagtgagccgagattacgccattgcactccagcctgggccaacaagagcgaaactctgtctcaaagaaaaaaataaataaataaaaaatatatgtatatgtatgtatgtgtgtgtgtgtgtatatatatatatatatatatatatatttaaaatcaacttttaaagaatagcaatagtaaaacagtcctgcttacagtgttccttttcctgaagttgtaattgtcagaactatgtgggaagtttgcttttgtcttcaccaaatctgttaaggagccaggttgcagttattctgaatggacagagatgttttcactgaaaaggaggggagtctgagagtctctgtaaggaaaaagtgtaggtgagcctgaaggagaaattgtagaactgagacttgtcaggagagtcatgcttgctgtgattagaggcgggagttcacgggctggtaggagacggaggagggcacagactgcaggcaggtggggtcctgcttcaccatttctggtcatgtgactgagtgttgggggttgactcgcctgcctgcttgtgtagaaatagtctcaacagattgtaacaatttgcccttatttaacttcaagatagaatcttgtctgacaaattttatatttcctattaatgatgacctaaaaaccaaataatcagaaaaaaaatcaaatatttgtaatgtcttatgtatgggttctgggaaacatataaagaaggcatcaccacttttctctccagagcctcctgttctttttagaaaaaaggtcgtgtgtaaagaagcaaatagcacatacacggcatgataggaaactggagttagccgtgaagagctttggaagaggtgtgcaggggtgtgggctagagttggaccaaggatagaaggcacaccccttagtagcagagcaggtagttgtcattttatttgagaagtggcaggatttagggaggtgggaagggaagaatgttttctggagatgaaaggtaagagcaaagatgtagggggaattggggacacagagcagggaggggccggcctcctagttgtgccctggaaagaagtcaggtctatgttagaagtggaaccaattggccaggtgcggtggctcacgcctgtaatcccagcactttgggaggctgaggcgggtggatcacctgaggtcaggagttcgagaccatcctggctaacacagtgaaaccccatctctactaaaaatacaaaaaaaaaattagccgggcatggtggcacacgcctgtagtctcagctactcaggaggctgaggcaggagaattgcttgaacctgggaggcggaggttgcagtgagctgagatcacgccactgcactccagcctgggtgacagagggagactccttctcaaaggaaaaaaaaaaaaaaaagaagtggaaccaattattactttaccaggytctataattttaaatactgtaaatctactactgtcatgcttacagtgttagaggaagggaaactgtcatcataggtaatggagcctgggctggggaagtgattcccgcatygatcaatgctcactgtaaagaacgagtatgacccacagggacgcagaggtcattccatggcttcaagctcatgggccaggacagtgccacagaaacttcaactagatgcaaagaggccttagctctggggaacctgcagcccccgcaggcagtaacaacactgggtgtctgggatggcctgggctaaggtgagatcggcatggggagatcagcattgtgatgaccagtgcctctggtatttgcaccctccttggctaggacactcgcccaggcatttgggctgagtagtggaatgagattaccgaaaactttgggtgattcccacattcatagattgtggacagaaatccactctagcagtactcacctcataatgctggaaatttcccaaaaaggaatgaaatcattagagtaaaagcaatagagtatattttaaactgctacagatggtcacactgattggtcccttcatgagatgccaggacaggagaggctggttagtccctgatttgctcataagtctgcatgcagctgagtccgaactgtcagtccctttgttttccagtctacacaaaccttgttgtcacaagtttgcccttgccccaatgtggatagctgccaggccctctttctgagcctcctcgtcaccttgcctcaagccctcacatgtccccagcagggtcagtgtggggtcattgcaggctcagccatctgcctgttcttcttactcctcttgacacccataggacatgatttgatttctattaaatccagaaactcagggagctggagtgtgtgttatgtaactctcagcatttttcgtgaagaattacatactttctgtaagtgcagctgaggtcatcccataacctcatgcatgattgtgaaacagacctgatttggctcagtgctaatatggcctttgggatctttgttcatgaaagcatttcctcagtgcagcaatgcaacctgctgcaaagggagaacccgctcctgccagaggtatggctcaggctgccagacacaaggagattccccatgtgtcctggctgtgatttcagcagacagttaccacagtgcagtatggcatggtagtcgcagtacaacatcaccaggatgatcaagagcaaataccatgacaagaggaagactgactacaggtgccctgtcagcagaagacagactggacagaaaagtatctgcgggaagaaacaacacactatcgggatcaggaaagcatgaaatgtcagtgactcaaaaccaatggcttttacactcaggcagcctgggcatcgtagcaaagctgcacacctccaagggggccccgtaagcaaaccagatccttacgtccacatgctgctatcctagtgagcacctgccacatccaccaaaaggcaggacacctgcagttctgtttttaaaaattctaggttttgtccctgacacacaaatcatgggtcttaaccaaggatgactcagcacagcgctgaggaccagggtaatcacaagaactcagggaggtgcaggtcagtaggcccgtaggctgaggacacagcaggagagggtgtgttgtatatcaccttggctagccacagcgtccaggttttttttgctaaacacccatctagatggcattttgtaaagataagattaacgtttaaaccagtagattttgagtaaagtagaagaccttgcacaatgtgagtgggtttcatccagtcagttcaaggccttcgagaaaaaactgaggttcccagaaaagaaggaattctgcctccagacagccttcacacttaagctgcaacatcagctctgctgtgggtctccagcctgccagcccgccctgcagactttgcacttgccagcctgattccttaaaaacccatctttctcggccaggcacgatgactcatgcctgtaatcccagcactttgggaggctgaggcaagaggagtgcttgaacccaggagtttgagaccagcatgaccaacatggtgaaacctcgtgtctacaaaaaaatgccaaaattagccaggcatggtggcatgtacttgtattccctgctacttgtgtgactgaggtgggaaaatcacttgagcttgggaggcagaggttgcagtgagctgagatcgtgccactgcactccagcctgggtgaaagagtgagaccctgcctcaaaaaaaaagaaaaagaagaaaagaaagaaagaaaatcattctctctctccctcttcctcttcaccctctcagttctgtctctctggagagctctgactaatacaagggttttaaagaggtataggctgtgtatccaaggagtagaggtggtgggcttacatgattgtggcattggggacactgagcaaatgagtaaacatatcaaaggcagtgaggatggagtgtcttgcagttgtaggagatatttataggtgtggaaggaggtggcctagaaagtgttggattaaaatttggaggtatcaatacaaactcatagttttattgcatacacacacacacacacacacacacacacacacacagaaatagccatgtatatgtgcgcctgcatatgcacacatgtattttttagatgtatgcggaatgggcctagaaatgatgatatcctggcagtgatgagcacacaaatactggtcttaaatcccatcctctactggaggaagctggcttcttagagaaacagctgatattgtccagggctggacagggacagtacaacatggaagctacaatgttctgttggtcaggaagcaaggaggtgctcatgaatgaaagagacctgtccctgttcacaggaaagggaggcagctggacagagctgctctccctatcaacctggaacagtgtgagcattaaaataactaacaatattaatgcaacctgtcgaataaaataggaaccatgagtacatactaacacgagtaaataaacaagggagaagggaaagctcttccttgcagagaatgccaactaataaatttaggagtaatcgaaactggtgtttgccatccatcaaccacccaaggggctggttcagacgcwgttgtcaatactgctgaggctggggtggaggtttgaggaggaacaggatgtaaagtttcttctcacaaaatactaccactatactcattgccaaggaaaacaatggtgagtgaaagggaggatagcagacagcagcctcccaggtgagcagagttaacctgacctgatgcagtatgtccttcccaagtggggacccaaggtctgtcaagggtgcaaagacaagaaggatgaggagctgctcctggttggaggagccaaagagacctggcaagtgatgctgccctcccatgtggggtctggggccaatggctaagctagtgctgccctcccggaacagagggtccgggtagtcatgttggagagtgtcctagcaatgcatcaggtctacagctctttcagtgctgagaacagatgatgatggcagggtgtgttggtgttgagcagatataccaaggtgctagcatgttggggatttggggccctgtggactttcctgctactttctatgtttgaaattatctcaaaacgttattttttgaaaaacaaatgatgcatttcctctgtttaccttgtggacttggcaatcagaacattctggatttggggtctcctttggtgtttacaggtcatgtccatcctgttgcatggggatgctgcatttgctggccagggcattgtgtacgagaccttccacctcagcgacctgccatcctacacaactcatggcaccgtgcacgtggtcgtcaacaaccaggtacctcacaccagcctgcggctttgctgctcacatcagtcttacttagaatgacatctctgagtcatttaggacgttcactgttttctgattataaaaatacatctgttattaaaaaccaggtgcagtggctcacgcctgtaatcgtagcactttgggaagccaaggcaggaggattgcttcagcccatgagtttgagaccagtctgggcaatatagtgagaccccctttctctgcaaaaaaattgaaaaattagcactgggtggccgggtgcagtggctcagtcctgtaatcccagcactttgggaggccgaggcaggtggatcacctgaggtcaggagttcaagcctggccaatgtggtgaaaccccgtctctgctaaaaatacaaaattagccatgggatcacatgcctgtgatcccagctgcttggaaggctgaggcaggagaattgcttgaacccgagaggtgaaggttacagtgagccaagattgcgccattgcattccagcctggacaacaagagcgaaactccatttcaaaaaaaaaaaagaaaagaaaaaaagttagcaccgggcatggtggcccacaaatgtaatcccagcactttgggaggccaaggtgggcagatcacttgaggccaggagttcgagaccagcctggccaacatggagaaacctcatctctactaaaaatacaaagctacctgcttggtggcgcgcacttgtaatcccagctgcttgggaggctgaggcacaagaatcacttgaaacccttgaggcggaggttaccgtgagccaagatcacaccactaagcctgggcgacagagcaggagtctgtctaaaaaaaaaattaaaaaaattaggcatggtggtgcatgcctgtggtcctagctacttgggggtttgagataggaggatcacttgaacctgggaggtcgaggctgcagtgagccatgattatgccactgcactctagtctgggcaacagagtgagaccctgtcttgaaaaaaataaataggctgggcgtggtggctcacacctgtaatcccagcactttgggcggccgaggcrgacggatcatgaggtcaagagatcgagaccatcctggctaccacagtgaaaccccgtctctactaaaaatacaaaaaaattaggcgggtgtggtggcgggcacctatagtcccagctacttgggaggctgaggcaggagaatggcgtgaacccgggaggtggagctcacagtgagctgagatcacgccactgcactccagcctggatgacagagcaagactctgtctcaaaataaataagtaaataaataaataaaaaagaaaaaaatagattttaatacattatttttaagatggcattattgttttagatttttgtttgtttgtttgagaccagtcttgccccatagctcacgctggagtgtaggggcatgatgatagctcattgcagccttgaactcatggactcaagcatcttcctgcctcagcctcccgagtagcaaggactatagacgtgcaccaccactcctgactaatttttttttattttgtgtagaggcgggatgtcactctgttaccgaggctgctcttgaactcctggcttcaagtgatcctcccatcttggtctcccaaagcactgggattgtaggtgtgatccaccatgcccgacaagaatattttcttctggttccacaggcatacagatggcctgtgcatggggacgttctctttctttaagaaactgggttccatgtacacagctttatatccactcttatttaccacatatttgctcatatcattacgtacccttttaaaataattttaatagaaatatcttataacttgtttcataaaatggactcttaggattctcattttttattttcagtaaggctgtgatgaacattctcatgaatatttctgcacaggcctgatacatatcacctgttagattcttccaccagccgtagctaaggrttcccctcatcgatgcgtgtgaagtttccataacagatattctagtgccttttaactctaggcactctcctaggtaccaggcagagcaccggtgtgctccctatcatcacagaccttatagtttagtgcagggtcagggggctcatagacagtgccatgaagtgggtgtgggaggtgttctgcaagatactgggttagtcagcagacaagtcactgaggatttgacatttaaatggaaacttcaaggtcaggtaggcaaatattggggagcatcagatcaagtcaggagagaggtcctagtgtctgaaggagtggacaaggccatcgcagctcatcgttagtgcaagagagaactgccatcagccagcgcctgaggaaagctcccartggcattgggaggccattggagagactgacgcaaggaagtgatgagatactggttggttataaagatgatttgttatagtttagaattgattagaggaggacagagaaacacatgcagctgtctcagcaagaagtagagagagggaaaaatttaaatttaaataagtaaatatgctcactaagtagcaaatactaaagagctcaaaatttaagaggtcaaatactaagagagggtaagaacattatccagtgcaaatataacacacaatatggtaaaagctaccacttactgcctactgtgtcccagatgctgaattaggtactttatgtatattaacttaatttgtagggtagttacccatgcagtgagtggtactattcccattttacagaagtgaaaattgaggagcagagagattgaatagcttactagaggaaatgataagagtcagtatttgatctgctttctttgaaagaatagtgttagaaaacctgaaaagttccctgtaccaagggaacagagatgtctaaaaaaaaccaacctcactactgaactgagtttttttctatttttttttttgaaacagagtcttgctctgtcacccaggctggagtgcagtggcgtgatcttggctcactgcaacctccacctcccaggttcaagcgattctcctgtctgtctcccaagtagctgggattacaggcacgtgccaccacacctggctaatttttgtatttttagtagagatgggatttcaccatattggtcagggtggtcatgaactcctgacctcatgatccgcctgcttcagcctcctaaagtgctgggattacaggcatgagccaccgctcctggccttttttctgtttttttactagggtaaaatatacataaaatttacattgttaactatttttaagtgaacagtttagtggtattaaatacattcataatattgtgcaaccatcaccaccacccatctccaaaactgtttcgtctccaacagaaattccatacccattcaacatgaactccgagtccttgcttccctgacccccagcccctggcaactatccactctactttctgtctctatgattttgagtactctaaggacttcatataaatggaatcatagtatttgtctttttgtgcctgggctatttcacttagcagaatgtcctcaaggtccatccacgttatagcatgtgttagagtttcctacctttttaaggctgaataatattccactctataagtaaaatatatcacattttgcttattcattcatcagtggatacttgggttacttccacattttcctgttatgaataatgctgctatgatgctatgaacatgtctgtccatatatctctttgacaccctgctttctttttttttttcctttgagacggggtcttgctctgttgcccaggctgaagtgcagtggtgtgatcatagctcactgcagcctccaactcctgggctcatgcagtccccccacctcagcttccaaaatagctggaattacaggtgtgcaccaccatgcccagctattttttttttcaattttcttgtagagttagggtctctctatgttgcccaggctgctcttgaactcctgggctcaagcagtccctcctctgaggcctctcaaagtgctgggattacaggcatgagccactgtgcctgactgaaatcctgctttccgttctttggagtatatatccagaagtggagtggaattgctacatcatatgatagttctatttttaactttttgagtaactgcttattagttctaattttctttctttctttttttttttgaggattctttctggatggacagtcatgtgacttcaaatagagaaagttattttccttcctttccaatccacatgtatctatgctttgtattttcttttttcttattgcactggctaggacctcagcacagtgtcaaagtggataaaaacggacatccttttcttgtttccaatttttggaagaaagtgtttagtatttgatcattaagtatgatgtcagctgtagcttttttgtagatgtcccttaccatggctaggggagttcccttctgtctctaatctgtggacagtatatataatgaatggatgcttatttttgtcagtgctcttctgcatccattgagatgaccatatagtttgctaatgatgaagtacattaattttcaaatgtggaatttttgtcttatgttcaygaggggtattgatcttttgttgtaatgcctttatctggttttgctatcagggtaatgctggcctcgtgaaatgttaagaggaggttcctcttctatattctgaatgagtttctgtataattaatattattcccttcctaaatgattggtagaatccaccactgaaagacttctgggcttacagttttctttgtgggaaggtttttattttctttttttctttttttttttttttttgagacggagtcttgctctgtcgcccaggccggagtgcaatggcatgatctcggctcactgtagcctccacctcctgggttcaaggattctcctgcttcagcctcctgagtagctgtgactacaggcgcctgccaccacacccagctaatttttgtattttcagtaaagacagatttcactatgttggtcaggctagtctcaaactcctgacctcaggtgatccacccgcctcagcctcccaaagtgctgggattacaggcatgagccaccacacccggccatatttttctttgtctagttttcagaagtttgatgtatcttggcatgaatttctttgggatttctgtttgggatatgctcatgtttttaaaaaaattttttttaattttttttttttttttttttttctgagatggagtctggctctgtcacccaggctagagtgcagtggagtgatcttggctcactgcaacctccacctccgaggttcaagcgattctcctgcttcagtctcctgagtagccgggactacaggcgcttgccaccacccctggctgatttttgtatttttagtacagacagagtttcaccatgttggccagattggtcttgaactcctgagctcaagtgatccgcctgccttggcctcccaaagtgctgggattacaggcatgagccaccatggccagccaaaaaaaaagaaattttttttgttttttaaatttttagacaggttcttaactctgttgcccaggctggggtgcaggggcacaatctagactcactgcagcctccacctccgaggctcaagcaatcctcccacttcagcctcctcagtagctgggactatggccatgcaccaccacacctggctaatttttatggttttttttgtagagacagggtttcactgtgttgaccatgttgactggtcttgaactcctgagttcaagtgatccaccctcctcagcctcccaaagtgcttgggattacaggcgtgagtcaccacacccgcctgctcaacttttttaaattgtattttttaatagctttattaaatgtagttcacttatcatgtaatttacccctttcacaagtctgcaattaagtggtttttagtatatttataaatacgtgcaactatcacagttgatttcagagtgttcatcacctcaaggaaaaaccttgcatcccttagttatcttactcctacccctccatcctcccaagccctaagcaaccactaatctactttctgtctctatagatgtatttattctgtaaagttcatattaattgaatcatacaatatgtgccctatatcagttggcgaacgtttagattgtttctacttttgggctattataaataatgctgctgtgggctgggcatggtggctcacacctgtaatcccagcactttgggaggccgaggcaggtggatcatctgaggtcaggagttcaagaccagcctggccaacatgatgaaaccccgtctctactaaaaatacaaaaattagccaggcgtggtggctcgtgcctgtaatcccagctactctcgaagctgcagcaggagaatcgcttgaacctgggaggcggagattgcggtgagccgagatcacgccattgcaccacagcctgggtgacagagcaagactctgtctcaaaaaataaagaaataaaataatgctgctgtgaacatttatgtacaagtgtttatatatactttttttttttttttttgagacggagtctcgctctgtcgcccaagctggagtgcagtggtgtgatctcggctcattgcaagctctgcctcccaggttcacgccattctcctgcctcagcctcccaagtagctgggactacaggcacccaccaccatgcccagctaattttttgtatttttagtagagatggggtttcaccctgttaaccaggatggtctcgatctcctgacctcatgatccgccagcctcggcctcctagagtgctgggattacaagcgtgagccacagcgccaggccttatatatacattttttgttgttgtttgttttttgtgccacctactctcctctctgtggcccaggctggagtgcaagtggcataatctcagctcactgcaacctccacttcccgggttcaaacgattctagtgcctgaacctcccgagtagctgggactgtaggtgtgcaccaccatgcccggctaatttttgtatttttagtagagatggggtttcgccttgttggccaggctggtctcgaactcctggcctcaggtgatctacctgcctcagcctcccaaggtgctcttattacaggcatgagccactgtgcccagcctgtgtctacatatgtttgaattccttttcgggtatatacstaggagtagaattgctagatcatgtggtatctctgtgttcaactttttgtggaaatctcagactgtttcaaagtggctgtgccatttttacattcccactggaaatatatcagggwtcctttttttttttttttttttttttttgagacagggtcttaccccgtcacccacgctggagtgcagtggtacagtcttagctcactgcaacttctgcctcccaggttctagcgattcttctgcctcagtttcccaagtagctgggattacaggcacgcaccaccactcccagctaatttttttttcttttttttttttttttttttttttttggtagcaacagggttttgccatgttgcccaggctggtcttgaactcttgacctcaagttatccacctgcctcagcctcccagaatgttgggattacacacatgagccaccgcacccccagctaggattccagttttttcatgtcctcaccaactcttgttattgtctgttttattctagccatcctagaaggtgtgaggtgatatctcattttggttttaatttgcatttccctaatgactaatgatgtgtgtgtcttttcatttgcttattggctatttgtatatctttggggaaatttctattcagatcctctgcctattttttgactggattgtctttttattgttgagttgtaagagttctttatatattctggatatgagccatgtatccgatgatttgcaaatatgggacaattttggtgtccttggaagcacaaaagttttattttttatcaagcataatttatctgttttttcttttgttgcttgtgatttttggtgtcatatccaagaaggctttgcctaatccgaggtcacaaagttttacctcctatgctttcttctgagtcttatagttttagcccttacatctatgatctgttttgagttaatttttgtgcatggtgcaaaggagtcccgcttcattcttttgcacttggatactattttcaaatataaatgattgagtagcaaagcatctaatggacagagttagctccagtgggtggctacaattacccaagaagcagatattagttgaatgaaaggaagaactcctaacagtgagacctgttccaacaggggaaccagctcctccagaagttttggattcctcctcattggaagtattggcacagctagtgaacgagttgtcagggttgaagtaaatgggaggggtgagaagggctagaggtgagaggagaaaccatttggccctaaaggttcctttgtctcccagaccagcttttcctcttagcgagattttcctactaaaacactaactcccaaaagtatactaagagagtacattggtggtatagtggtaagtatagctgcctcaaataatatactaagaggtattattaatacacccatagtggaaaaaagtacagcrtatatttggagtatacctctgtcatatgtgtgtatgcacagccactagtatagataaccctgccggtagagtgcatctccatcacacgtgtgtgcacatccacccaagtagataatcctgctggtagagtgcacctccgtcatgtgtgytgccatccatatgtgcatgaaggcacagaagctcataacagtggtgaacattggagagggcagctgagacctcaaccttgcaaaatgggtttctttctgtgaggttctagcagtaaggcatgttatgatcactgacttcctgctgcaggcccttctttacatgctgaagcccaagatgggcaatgctggcttcaataccagctgagattgttcagggctctcttatgtgtcaggctctgatacaccattttttttttaatctcatcagtgtctgactatttctgatcatttctttagtcagtgtgagaagggagattatgtaaaagccattaaacataaatatagagttagattttgctaatattttctttatctctttactgctttgactcattgctcatgaggtagtgtggcatcaggaagatctgtagaaggagaggaagtaacttcttagctgagtctcttatttcttttagaacatacttagaaattcccttccagaaatttcacctaaggaagccatctgatggtaaatattttttcataagactctttgtctgccagatgcaatggctcaaacctgttcccaatactttgggaggccaaggcaagaggattgcttgagctcaggagttcaagaccagcctgggcaacaaagtgagaccctgtctctacacaaaacaaaacaaaacaaaaattagccaggcgtggtggtacacatctgtagtcccagctactgaggaggctgaggcaggaggattgcttgagcccgggaggtcaaggctgcagtgagccgtgatcacaccactacgttccagcctgggcaacagagtgagaccttctctcaaaaaaaaaaaaaaaaaaggtttttgtcaaaaccatatttgcgctaccacaaagttaggaaacaaacctatgtccaacagcagaagcgtctttgcataaaatttggcaaagccataggaagggatattaaacaaccactaaaaaagattaatatcctagggaatggccgggcacagtggctcacgcctgtaatcccagcactttgggaggccgaggcgggggatcacaaggtcaggagattgagaccatcctggctaacaccatgaaaccccatctctactaaaaaaaaaaaatacaaaaaattagccaggcatggtggcaggcacctgtagtcccagctacgcaggaggctgaggcaggagaatggtgtgaacccgggaggtggagcttgcagtaagcagaggtgcaccactgcactccagcctgggagtcacaatgagactctgtcttaaaaaaaaaaaaaaaaaaaaaaaagtttgatatcctggggaaatggtcacagtatggtaaatggaaattgcaggatattaatatgctgctagtaggagtgtaagtagaacagctactcaggagagcatttagaaaaattttaaatgctcatgcctgtggctcagttttccctttctaggattagattgcaaaaaaactcagcgtttgagggagaaaatttgtataaggatgtgtacagcaacattgtgtttaccacaaattggaaacaaaagaaatgtccaccaacaggagaatggataaatactctgtggggtatactgtgtctggttaagtttcactggaaagtagagactaaaggaagtatagctacatgtttcaacctgggtgtatcataaaagcaaatgttaaaaggcaaactgcaaagttaccaacaagcctcagaagatactatatactgtttacggacatatgaagtacaaatagcaacttgtggcagtgtcctcctctgatttaagggtaaggaggcctgcgggcttgagcctctgtgacagaaacattttggtccactaacaaatatggcgaaaccgttgggatttgttcatgttaggtgaaggcgttaaggatgagcagtgtggtattatcatgctttgtgtttgaaatatatcataagataaaaatttaaatgcaaaccataaaattatgaatatatcattaaattttggtacatctaactggtagggaatgttatgaagcctttaaattttcttttctggctgggtactgtggctcacacctgtaatcccagcattttgggaggccgaggcagaaggatcacttgagccccaaagttcaagaccagcccgggcaacatggcaagaccccatctctacaaaaaaaatttaaaaattagctgggcctggtggtgcacacctataacaccagctacacagaaggctggcatgagaggtgagctacgattgcaccactgcactccagtctggttgacagaccatgactctctctttaaaaaaaaaaaaaaaattcttgctgggcgtggtggctcactcctgtaatcccagcactttgggaggctgaggcaggtggatcacaaggtcaggagttcaaaatcagcctggctaacatagtgaaaccccgtctctactaaaaataacaaaaattagccaggcatggtggtgcgtgcctgtattcccagctactggggaggctaaggcaggataatcgcttgaacccgggaggtggaagttgcagtgagctgagatcacgccattgcactctgcttgggcaacagagtgagacttcgtctcaaaaaaaaaaaaaaattcttaggctgggcacagtgcctcactcctataataacacttcgggaagccgagacaggaggattacttaggcccaggagtttgaggccagcctgggcaacatggtgagaccctatctctacaaaaaataaaaagaattaatcaaaataatagaaataataagatcccaaatttaagtatttatttacatatatatgcatacaaagaaaataatctggaaaggaaaacatcagaatatttaccccatagcctgtggaattataggtaacttaatttaacttttcatactatgtcttttaaattctctatgttaaatatatatggattttgttatcagaataggaaaaaacaaaggaaaagaaaaagtgtaaacagccattttggggtacgtactcagagtagccagatggcaagtgcatgccatgcccggcctcagccccgccctctggtccctgtgccggctgtgccaggtgccctcttgctaggctacatgttccttgcagatcggcttcaccaccgaccctcggatggcccgctcctccccctaccccactgacgtggcccgagtggtgaatgcccccattttccacgtgaactcagatgaccccgaggctgtcatgtacgtgtgcaaagtggcggccgagtggaggagcaccttccacaaggacgtggttgtcgatttggtgagtgactctggggacagcacgtcctgggcagagcatctgacccacccctcttgccctcggcacccctgtgtcccaaggagaggagcttgtctagatgagtcacctcagggctctctactgccaggcctcatgctggttcctttgagctccaaatagttcaggcctgtaagcaccaaggaatgcttcccaggcaggagctgtggtggtgaggagggccactcctcattgacagagcagctctactrtgtgaaggagagatacacagaatcctaattctagagaaggtaaactccagggcaggcatgaggaatgaagaacgtggccatcacctaggagagatggggcaggtgcctgaacagcacttcttcccaaggggccagcccttgtctctgacatcctctcactgctctgagcaggtgtgttaccggcgcaacggccacaacgagatggatgagcccatgttcacgcagccgctcatgtacaagcagatccgcaagcagaagcctgtgttacagaagtacgmtgagctgctggtgtcgcagggtgtggtcaaccagcctgagtatgaggtacgtccctgcggctctatcccagtgcgcctttccagggctggcgatgactagaaaaggtgggccacagggccagttctcacttttgccagttatgaggatacacgtgagaggatgtgaaatatttacaactacagcatttcaatgsataactttttggagaatctgggccactgagatgctttataaaggaagtgggccttaaacagtgttttggggaagggaaggggatgttttcaggttgaggtagtagcagcccagtaggttttctcagatttcacaaattgtgcatggttgagaggtgggtggtggatccagcttggtaaggggcctgttgtaatctggatagtaagtgctggttggttgtgagtgggaaggccaagcagctgccctagagagggagagggtgggtgtgaggagctatatctgagcatgggaacaggacagatcccagatcagaacaacctgatagcctgtagcctatgctggagacagagctttgtgaaccagttttttttttgttttgttttgttttttgagacggagtctagctctgtcacccaggctggagtgccgtggcatgatcttagctcactgcaacctccacctccttacttcaagcagttttcatgtctcagcgtcccaagtacctgggattacaggtgcgagccaccacgcctagctaatttttgtatttttagtagaaacagggtttccccgtgttggccaggctggtcttgaactcctgacctcaagtgatctgcctgtcttggcctcccaaagtgctgggattataggcatgagccactgcgcctggcctggaccagttcttaagaaaaaatgtggtgggctgggcgtggtggctcatgcctgtaattgcagcactttgggagactgaggcaggtggatcatgaggtcaagagatcgagaccatcctggccaacatggtgaaaccccgtctactaaaaatacaaaaatttgctgggcgtggtggcacgcacttgtagtcccagctactcaggtggctgaggcaggagaatcgcttgaacccgggaggcggaagttgcagtgaggcaagatcgcgccattgcactccagcctggtgacagagcatgactccgtctcaaaaaaaaaaaaaaaaagtggtgaagggttaggggttcaaactccgagcagaatctctacccagcaaatgtgaggaagaaacttttgggagtgaaaagaataaaatcttagaaaggtgttatgcctattgagaaggagcaggcccagaggctgagatgttttgcatccacgaagtgtgggactatgggtgggcatgcacgggagttgtgccaggggtatggttgggcttgcgtggtggctgtcagaaagtgtgggggtacaggtgggcgtgtgcagtagtcatgccctgtgccagtcacgctgtgttgtgcccaaccctccaggaggaaatttccaagtatgataagatctgtgaggaagcttttgccagatctaaagatgagaagatcttgcacattaagcactggctggactctccctggcctggtgagtgaagaaacagtgccacaaataagctcctttgaggatctgatgtaacgaggcatcctcttcccagaaaaaattcatgctttccactttgtacccacaatgcacagttgtatgcaccatttcagcaaagccccctgcagaccctggacccagacccctgcattaatgttttctggggaacacagtgtgagctacattgtctctcaccctgcttctccccaaaatcacgtgtctgccattttgtggtccctggaaaagtagagcagatgtcatgcctcagttgttcttcttctcctaggcttcttcaccctggacgggcagcccaggagcatgtcctgcccctccacgggtctgacggaggatattctgacacacatcgggaatgtggctagttctgtgcctgtggaaaactttactattcatggaggtaacacgctctgtgctgacctgtggaaatgttggggcccaggccaggggcgacgactgtctaggactgtgaccttggcccccacccatcatgtgtcctacagagactcccttcctgccctgctcaaggcctctggggtggttggatggagccacctctcccactccctgcccttagcacgatcctacacttcctcagtggtaaaggagagactgaggtcacagcttttccagcaagtcaggaacccagaaactacgagtaaagaaggctccgctcttgccatgggcacgctgagaagcaaggcaggcatgtgcaggcagggcctgcagcagctggtgagagctgtgtctctgcagggctgagccggatcttgaagactcgtggggaaatggtgaagaaccggactgtggactgggctctagcggagtacatggcgtttggctcgctcctgaaggagggcatccacattcggctgagcggccaggacgtggagcggggcacattcaggtaacgttctgggcagttttgtttgccctccaaagagtagaagatggaaagggaggggttctggtgtttcttttccggaagacggttagaaaccggaagagtcacattgctctcaggctgaaaacctctgtccctcatttgctatgggtgcttctgttaagacctgggtggggccgaccctgcagctgcctggccagaagtccaggtcacagagcatggcatctgctggtgcttcgtgcgggtccccagcgtatttgcttgtcaagtcagagctcctaattattacctctgttgtcctgtctcagccmccgccaccatgtgctccatgaccagaatgtggacaagagaacctgcatccccatgaaccatctctggcccaatcaggccccctatactgtgtgcaacagctcactgtctgagtacggcgtgctgggtgagtgcctggagccacaccaccagggcctgtcacccacccacccccgctgggcctactggctggtgtcctggacatggttttctccttcctttgtcccttgtaggctttgagctgggcttcgccatggccagtcctaatgccctggtcctctgggaagcccaatttggtgacttccacaacacggcccagtgtatcatcgaccagttcatctgcccgggacaagccaagtgggtgcggcagaatggcatcgtgttgctgctgccccatggcatggagggcatggtgagcctctggcccttccctgccagacctaggacttgggaagggcctgtgtaggaccctgaccccaaagactggcacgagagccagtggctcacaccagcctcctaaggactctgctggtgcttcccatccatctcagatgggatgtcacttcagaaagccagagtagcccatctggatgtggctagcatgccccgtccctgctggtgcagactccctagatgcacaggcgtccaagtgtggaaatgatgagccaagtgctttgctggtgggagggggaaggaactgaaccctgccatcaagaaaaaagataaccagaaatgagctagttggttgaggaggaacagcagatgcggcaaatgtcagtacgcaagagctcttaaactgtaacttgcgtgtgtggttccagggtccagaacattcctccgcccgcccagagcggttcttgcagatgtgcaacgatgacccagatgtcctgccagtgagtaatacaggccctgtcagcccagccattctcggggtgtctggtgggaaacctggrgaagagcaatctatctggtcatcctgaagtggcagaccgtgcctctgtccctttctccatcctggggagctcacgtgagtggacaggtgtggccccatgcttctgggcgccctgggatgagagacttcctcagagcacagaggaaggtgcagggactgcctccattggcttcctgctgttgctgcaagcacagaaacgccatgtgagctcctcagcaagggctcctgcgggatgcttccagaccctgattcaggtctggaagccctgaggaggagagaactttggggcgattccagtgaaactttaagaactcaaagaaccagcctgggcaacatggtgagaccccgtctctacaaaaattttaaaaagtagctgggcgtgatggtgcacgcctgcagtcccagctacttgggaggctgaggtgggaggattgcttgagcttgggaggtcaaggctgcagtgagccaagatcgtgccactgcactccaacctgggtgacagagcaataccctgtcttaaaaaaaaaaaaaaaaagaactgtgctgggtgtggtggctcaagcctgaaatcccagcactttgggaggcccaggcaggcggatcatgaggtcaggagtttgagaccagcctggccaatatggtgaaaccctgtctttactaaaaatacaaaaactagctgggcatggtggcgcccacctgtaatcccagctagtctgaggctgaggcaggagaattgcttaaacccgggaagcagaggttgcagtgagccaagattgtgccgctgcactccagcctgggcagctccgtctcacaaaaaaagaactggccaggcgcagtggctcacgcctgtaagctcaacactttggaggcccaggcaggtggatcacgaggccaggagtttgagaccaccctggccaatatagtgaaaccccgtctctactaaaaatacaaaaattattcaggcgtggtggcgggcacctgtagtcccaactactcaggaggctgaggcagagaatcgcttgaacccgggaggtggaggttgcagtgagccaagattgcgccactgcactccagcctaggcgacagagggagactcctgtctcaaaaaaaaaaaaaaaaaaaaaaaactcaaagaaaatgattaggtgtcagtgtctaaggaaaattggttttaggtagaacttgtgtctcttaaagtggtatttgtttcatgctgggcaatagctttcagagaaatagtatggattgagtgggactgaggctctcctccagggtatgaggctggccgaaggagcttgctggactcacttgttagtgtcagcttatgtctcctggggagtcagtgtgttaggccattcttgtgttgctataaagaaaaacctgagactgggtaatttataaagaaaagtttaattggctcacagttctgtaggctgtacaggaagcatgatgctggcatctgctcagcttctggggaggcctcaggaagcttacaatcatgacagaagatgaagtgggagagcaggcatgtcacatggccagagcaggagtaagagagtgggggagaggggccacacactttcaacaaccagatctcgtgtgaactcagagtgagagctcactcatcaccaaggggatggcccaagctctaatcctaacacctcccaccaggccccacctccagcagtgggagattacaattcaacatgagatttgggcagggacaaatatccaaactagatcacctgagggcccccacatgccccagaagactcagtgctgtgtcctggcctctggccatttccttccctgctgcaggaccttaaagaagccaacttcgacatcaatcagctatatgactgcaattgggttgttgtcaactgctccactcctggcaacttcttccacgtgctacgacgccagatcctgctgccattccggaagccggtcagtggcagggcctcccttgctcaaacgaggcctggccctgccctgttggtgcagggaagggctcctcagagagcctcttgcttggggttagctaggtgggcacctgcaggggtagtgtggacaggacatggtgtcagggagcctcgcccttcctcctcactgctgccatgagggaactgcgtgttctgtgtgtcctcttccccgactgggcccctgcatactgctgagcaccacatgcggagcaatcacataggctgcaggccccagcccggtggggaggacggatgtttgaacaggtggtcatagggggtgtgctgagctctggaagagaggtgagccctggcagaggccaagggagtgcagggtccccagggagcggctcctgagctgggtgttgaagggtgagtagaagttgagtggagggatacgttggagaagtgattcataaaaaggaaggaggccgggcgaggtggctcacgcctgtaatcccagcactttgtgaggccgaggcaggtggatcatgaggtcaggagatggagaccatcctggctagcacagtgaaaccccgtctctaccaaaaaaaatacaaaaaaattagccgggcatgacagcgggcacttgcagtcccagctacttaggaggctgaggcaggagaataggagaatagcgtgaacccgggaggcggagctggcagtgagccgagatcgcaccactgcactccagcctgggcaacagagcgagactccgtctcaaaaaacaaaaaaaaggaaggagtgtgggggacagcgagggagtgccctgctgccctgggataccgcgggggtgggagtatggggtggaggcttgcagctcggagtgtccccagcagtccaagggcccacagggcaggacagccctggtgcttcttggtgctgggccatgtcacagccttacatgggctttgggtgcatttgctctgagactgccaaggagagggtcagagctctttcctaggtacagagaagcagggaagggagtattgggagtccgagcaggctgggatgggccctgccaggagtggatacccagctaggggaggtgaacagcagggaaattggtcatctttccttttccctccttctctgcctcttctgacctgaggctcctgttgagtgggagggcaggtgtgtttcatggcctgaaggtcaaggcttgggtagccttgcttttgaccttccttctggaatcttcagaatctgatccttcacgagcctattgttctgtatttcagttaattatcttcacccccaaatccctgttgcgccaccccgaggccagatccagctttgatgagatgcttccaggtgggtgtgagggagatgggcatttccttgggggaagctatgtttggggcttctttgctgctgctcttttacagctcatgggactgacatttgtgattctcactggctcttgccagatttttggttgtaaagacccgtgatacatggctgggcacagtggctcacgcctgtaatcccagcactttgggaggccgaggcaggcagatcatctgaggtcaggagttcgagggcagatcacctgaggtcgggagttcgagactagcctgaccaacatggagaaacgccatctccactaaaaatacaaaattagccaggcgtagtgccacatgtctgtaatcccagctactcaggaggctgaggcaggagaattgcttgaacccaggaggtggacgttgcagtgagctgctatcacgccattgcactccagcctgggcaataagagcaaaactccggcacaaaaaaaaaaaaaaaagtcccatgataccagatgagggaggtcacagcttacattcacgttggtcaaatgacatgtcttaacatgcagcccaggagctgttgcctctcacctgcaaatgcccccaaggactccactagaggcaattaagtatgtccaagattgagggttagtgccgctgcctgcggcctccttcagcaggtgagtggcagctcaccactggctcagaggcccagccccaaagcaagcccttcaggacagagaaaaaaacactggacggcaggtcctgccaagtcacatgccagctgcacttgtgtgaagggagacccataacattgagatttctatagggacagtggagtgcaggatgttgacacagcctttaccacccaccaggggtcaccaggccaggaagcctgcatcccaccagtcaccaaaccccctttagtcttcaatcaaggtgagccccttgttttttgggggttttttcccaatctttttttatttttaattttatttatttatttatttatttatttttgagacggagtctcgctctatcgctcaggctggagtgtggtggcacaatctcgactcactgcaagctccacctcccgggttcacgccattctcccacctcagcctcccaagtagctgggactgcaggcgcccgccaccacgcctggctaattttgtttttgtatttttagtagagacggggtttcaccgtgttagccaggatggtgtcaatctcctgacctcatgatccacccatcttggcctcctaaagtgctgggattacaggcatgagccaccatgcccagcccccagtctttttttattatggtaaaatacacaacataaaatttaccattttgaccatttttaagtatccagttcagtgtgttactgcctctataaatttgactactctatggaactcataagtgaaatcatacagtctttgtcccttgcgactggcttgtttcatttagtataatgtctgcgaggtccatccatgttgtgtagcatgtgtcagaatttctttttttttaagactgaatagccaggcatggtggctcatgcctataatcccagcactttgggagttcgaggcaggtggatcacttgaggtcacaagtttgagacgagcctggccaacagggtgaaaccccgtctctattaaaaatacaaaaattagcagggtgtggtggtgcacgccctgctactctggaggctaaggcaggagaattgcttgaacccgggaggcagaggttgcagtgagctgagattgcaccactgcactacagcctgggcaacagagtaggactccatctcaaaacaaaacaaaacaaaaaagactgaataggctgggcccagtggcttacacctgtaatctcagcactttgggaggctgaggcaggtcgatcacttgaggtcacgaatttgagaccagcttgaccaatatgatgaaaccccatctctacgaaaaatacaaaaattagctgggcatggtggcgcgcacccgtaatcccagctactcaggatgctgaggcaggagaattgcttgaacctgggaggcagaggttgcagtgagccaagattgcgccactgcattccagcctgggtgacagagactccgtctcaaaaaaaataaataaataaactagccgggggtggtggcgcatacctgtaatcccagctactcaggaggctgaggcaggagaatcacttgaacatgggaggcagaggttgtggtgagccaagatcacgccgttgcactccagcctggacaacaagagcgaaactccgtctcaaaaaaaaaaaaagactgaataatactccattatatgtgtatgccacattttgctcatccattcatctgtcgatggacacttgggttgcttccatgtttcagctattatgattagaggagctgctatgaacattggtgtacaaatatttctttgagtccctgctttcagttcttttgaatatgtactcagaagtggaattgctggaccatatggtaattctatttttagttttttgaggaactgccaaactttccacagtggctgcattttacatcccaccaacagtatatgaggatcccaccatctctacatcctcatcagcacctactattttctggttttttcatagtagccatcttaatgggtgtgagatgatatttcattgtggctttgatttatatttctgtaatgattaagtgatgttgagcatcttttcatatgcttattggccacttgtatatcttccttggagaactgtctattaaaatcctttttttttttaatttaattttttttaagagacaggatctctctatgttgcccaggctagtcttgaactcctgggctcaaggaatcctcctactttggcctcaaagtattgagattacaggcatgagccacggtacccagcctattcaaattatttgcccatttttgaatctggttgcttgtttttgagtcttaagagttctctgtatattctagatattaattccttatcagaaatataatttgcaaatattttctcccgttctatgggttgttcttttattctgttgttagtatctttggttttggttttgggtttgggtgttttttttgtttgttttttgtttttttccgagatggagtcttactctgttacccaggctggagtgcattagtgcaatctcagctcactgcaacctctgcctcccaggttcaagtgattctcctgcctcagcctcccaagtagctgggattacaggcgcacgccaccatgcctagctaatttttgtatttttagtatagacagggttccaccatgttgaccaggctggtcttgaactcctgacctcaggtgatctgcccaccacagcctcccaaagtgctgggattacaggcgtgaggcactgcacctggcctgttgttagtatcttttgatgtacaaaagtttttaattttctttttttttttttttttttgagacggagtctcgctctgtcgcccaggctggagtgcagtggcgggatctcggctcactgcaagctccacctcccgggttcacgccattctcctgcctcagcctcccaagtagctgggactacaggcgcccgccactacgcccrgctaattttttgtatttttagtagagacggggtttcaccgttttagccgggatggtctcgatctcctgacctcgtgatccgcccgcctcggcctcccaaagtgctgggattacaggcgtgagccaccgcgcccggccaagtttttaattttcatgaagtcagatttgtctattttttcttcagttgcctgtgactttggtgtcatatctaagaaatcattaccaaattcagtgttgtgaaacttttgccctatgttttcttctgagttttatagtttttgctcttatgtttagatctttgacccactttgagctaatttgttttgttttttattttttgtttgtgtttttttgagacagagtctcactctgtcatccaggctgatgcaatcgtagctcactgcagcctcaattcctgggctcaagtgatcctcctacttyggcctcccagagtactgggattacatgtgtgagccactgtgcccagacttttattctgtttgtatcataaatggaattgttggcctaatttcctcttcttattgttcattgttagtgtatagaaacacaactggttttggttacgtgcataygatgcgtagtgcttaagtcagggtattagggtgtccgtcacccgagtacgatacatgtttgttaaccttactcctttatcaaacgttgaacttaattccttctatctaactgtatgtttgtaccattcaacccacttttctatatttttttgagatagattcttaccctgtcacccaggttggagtgcagaggcatggtcatcatggttcactgtaacctctgcctcccaggctagagtgattctcccaccaaagcctcccaagtagctgggaacacaaggtgtgcaccaccgtgcctggctaatttttgtactttygtagagacggagtatcaccatgttgcccaggctggtctcgaactcctgagctcaagggatcctcctgcctcagcctcccaaagtgctggccaacccactgttctctatctgaatattttctctgattgtgttgaaagtttttatatttgtaaaattctgagcagcagaaacagagtaaacatgggattttttttatataatttttttttttttttgagatggagttttgctcttgttgcccaggctggagtgcaatggcgcattcttggctcaccacaacctccgcctcccgggttcaagcaattctcctgcctcggccccccgagtagctgagattacaggcatgcgccaccatgcctggcttattttgtatttctagtaaagacagggtttcaccatgttggtcagtctggtctcgaactcctgacctcaggtgatccgcctgcctcagcctcccaaagtgctgggatttacaggcgtgagccatgcgcccggctggtatttttttttttttttgtctggagatggagtcttgctctgttgcccagactgtagtgcatgatctcagctcactgcaacctctgcctcccgggcccaaccgattcttccacctcagcctcccgagtagctgggaccacaggcgcacaccaccatgcctggctcattttttgtatttttttagtagagacggggtttcaccatgttgcccaggctggtctcgaactcctgaactcaggcaatccgcccgcctcagcttcccaaagtgctaggattgcaggcgtgagccaccgcacccggccgggatgttttaataatactcttgtccccgaagtctgagccaagctgttttgaaggctagcctggtgttacttgatacccagagctggccatgtctgctgtgtatttgttacacgtaacgtgcttttcaaagtgtgcctggtctgagcaaatacagggcatcagaggctggtgaaggggaagcatctctaacccttgaaagctgcgtctcctggcagcagtccctggcacagccctgggcccaggagagctctcagccacatacctgagagaaccagcctagccatgggaactctcttgtaggaacccacttccagcgggtgatcccagaagatggccctgcagctcagaacccagaaaatgtcaaaaggcttctcttctgcaccggcaaagtgtattatgacctcacccgggagcgcaaagcacgcgacatggtggggcaggtggccatcacaaggattgagcaggtgagggcaggtggtgccatcagggtgtccccccagcgggggtcagggctctggtgccttcacagaacagccttgcttggggtgtggccctcaggttcctgaccttccctgctcggaacaccagtttccctttgctggatcttgcctgccctctgagtttcctctttttgatctgacccctgctgtctcctagctgtcgccattcccctttgacctcctgctgaaggaggtgcagaagtaccccaatgctgagctggcctggtgccaggaggagcacaagaaccaaggctactatgactacgtgaagccaagacttcggaccaccatcagccgcgccaagcccgtctggtaaggcttcagtccctgccaggaaggctgtgggaccctcccctcaggccagtaggcagttagccaggcacatgcagcagagggatgggctgggccaactcagtgtcccctgccctcactgccccctccctccatctctcaggtatgccggccgggacccagcrgctgctccagccaccggcaacaagaagacccacctgacggagctgcagcgcctcctggacacggccttcgacctggacrtcttcaagaacttctcgtagatgctgcctagggttgcttgggccactgccctctccacacccatgactgccccttgcttctcaactaaagaatagtgcctcagcgctgcccacaccaccgycctcctcgctgtgccaccacccctccctctgctctcataggagttaggctgtcgtccccctccagtgcttggctgccccacaggccacacgctgcccaggctctgctgacttctgagcagttttccaggaggccggggggagcaggaggaggaaaggtagcccccgagggatgtccttggggaggggtcagctctggccacaaycctccccaccagtctcacccactaggataggaactgggccttgtgtgctggcttccgctgtcacccagcaaggcacaggctcctgtatttgagactaggatagcttcatcttgagcctgagccttagaatctgtagaggagcctggagtcggatctagccatggctggcagaggtttctagggtgggccccagccgtggcgtgaactgaggatgacccggggcagctggcaggagagagccttggcctgacctggcacagaaagggcagcttcagtctctgcagtgtccattatctgctgttccttcgagggttccaggctgtgtgtggggcccaagcatgccccacccacccctcctgggcccaggcagcacctggagcccacagagtctgtgtgtagccaggaagccccgctcaggtagccaccrccggggcactggctgctctgtcttggtcctgttaaccctccacctcctctcttggamtccctccccaccccaaccactctttctttctcctttaacccaatggagactttctgatgcatcrttttctttgctgtgccaaagcaggtcagaagagggagaggaggggctgggggtgaggggccaggccatggccaaggggccagctgcccctcatttrtcactctgaccttcacagggacagatctgatttatttattttggttaaaaaaaaaaaaaaggaacagaaacaactttgcattgcattggcttgacccataaactaagttatatccgtgggcatgtctgctgtgtctttctgtctgttctgccttctcccctgaggggatggggatgggccagtcccctcctaacccacctgggaagcagccccctcctcattggacagggggagtgatgaccaccacctgcaggccctcgccggcaaagccgtcattgtgaatgcggcagaggcggcctgggctgccgggctgtttgggtgcagtcctgtttctgagctttccctgctctgggtccttcccctggctccaccttgaaaaagtactctgcactctgtgcctctccgtttgagccagcgtgcctgcgggttcaccctaaccacacgtttgttaattagtgctccccagagcccaagcaacgattccaacctggagatggggcctctcaccagcacacacctgggtcccctctggccaagagcttcatcccataacaagccaggtattggcttcctgagcactcaaccaatctcacccctgaggaagagcttaagtggggtcaagcctctgacccaccaccctgttctctagggagcacctgcctgggtccccggatttgtcctgttgtcgctttgcagcatggcccaaggttcttctgatggaagcatgaccaccagccagtgccaagtggagtgggtcctggggtgggcgtgaagagctgctgccatcacccccagagctgtagacaggcgctcctgcacacgtctgctggtgaccagtgccacctccctgtgcctcaccacttacccaaaatcctggccgggctgggtggctcacacctataatctcagtactataggaggccaaggcaggaggatcgcttcaggccaggagttcaagaccagcctgggcaacatagaccctatctctgcaaaaaaatttaaacatcagcagggtgtgatggcgcatacctgtagtcccagctactcaggaggctgaggtgggaggatcactcaagcctgggaggtcagggctgcagggagctgtggttgcactcccagctgggtgacaaagcaagaccgtgtctcaacaacaaaaaaaagattttggaaaaatggcctcggtgtgctgcagcaaggtaagctgggactcgcctcgatgcttcccagctggccagggaagcggaacatccgggtgagcagagcccaaactggttctgaggatctaggaacacttcccagggagtggggcttgagttggttcctgaagcggctcagcacggtgacccctaggttgtcctggtggtagttgtgaccacaggaacaggcaaagctcctctggaaattctaagtatgtgcaggtctttgtaagttctcactgcaggtctgtggccctcagcaccctgcaaggagaacagggctttgtaagggctctggaaagatcaggaacagtcagaacatgctggaccaggtgytcacacatgacgtcttgcagatggttccctggttttgttctgtttcagtttttaattgtcccattttctaaaattggaaaacaattgttggaagaagctccatgcagtctaggcagcatcttgtgtgtttagatgagacttagtgggtcaggaccgtgtgtgtgtgtgtgtgtgtgtgtgtgtgtgtgtgtgtgtgtgtgtcgaacagcagagtgacatcaggtgacagccttgggttagcatcacagatgcagcaggcatggtgtggtgtgggtgagctgaagggaaatgcaaaccgtttttaggacaaagaggccttgttctggtcactggcgagcagcttggccctgactcacccctgaagctcctgaattgtcgccgttggggcagggcagacagggacataacctacccaacatcactgccaacatccttgcgcttttctggatataaaaaaggtacttctggatccgaaatatctaagctagatgtgagagcgtcagcttgctccactggggagggaacttcagagccagcccccctcacccaagtactactgctggtgatggctggggtgggtgagggtgaaagaggggcatcaccagccccatgaactcagtgtggtctgagagtgccttctggagggggtgggggatgggggatggggaatgataggctgaggcttcactccatccgcatgtttgtgcaaaggtgtccacgcttgagaagggagaagaggctgccagccccactggagtgactaggaaccctacacccggattccctccctttcctccagcagaaacagaattggaatcaatgtccagtgatacttcaggcctaactttggtagggtagtgagctccctgtcgggatagtattcgactgggatttcactgtacagagatggtagaaatgtccctgtgtaggattccgtgatcttgtgaccagcaggtctctgctcagggacccctgctctgcccactccagtgtatgctagcacacctggctctctcagtccccaaaataaatcatcaaagacttccctgaatgacggccagagcagggggttttctccaggatacccaaaggggccacgttacccacctcctaagtcctcattcccccacccagcctcacccatcttcccagacctctcctccctagagcttcaccggcccccaacctggctcatgggctcagggccccagattgccatgggaacttctgttaactccaaagtgcccaagtccacccaggcccctggccagagtctccctctccagtgctgtatccactggtgtgtcggttgggtttgtcagccttgagacctgccaagaccctgtctcctttccagctctccccagcgcagaactgggttctggtctgcctctgaaactcttgacctgggcaccctgagtcccttcccttcccagacctctaccctgtgtagggaaccagccctagtgggaaaagtcactactgaacaggccccgaggataggggctgttccctctgtgccaggtcttctctctcatttcctctgctcactctggtcctgaaggtcaggcttaacagagtttagcacctaggttcaatgaagggtctgggctgtggatcaaggaacagttttgcttagttctggagttagcaaagccgcattgcctcatttgtcacagccagaggccaggaaaggaaggtaaacagattagtgaccaggttggtatgtccagaggctgtagtggtctgtgggagcagatgttaccggcacccagaggtgttggagggaaatgggtggagcttagagatccaggtgagataaaaacttgggcggaaggcagatagatgtcaggaaggcttgcctggccaaccgcaacgtggaactgggagacagtaggtcagaggggtgtgtagggggtgggggaggctgaatttgaaatctttgtgacctccaggtggaaatgtcagggaggccattggctttatggatcagagcagggaaacgcactgggtcctatgcatcatctgtgggtgggggtcctggcccctggggcactggataagacagtgggaagaaaggaggtggggagcaggcccccgacagctaaccatgtgcctctgcagagcagggggtgagtctagatgtccaaggggagtctccttttcttctccacccagccccagatcttgtccctccctaggttttttgtttggttggttggttggttgatttttggagatggagtctggctctgtcacctaggctggagtgcagtggtgcgatctctgctcactgcaaactctgcctcctgggttcacgccattctcctgcctcagcctcccgagtagctgggactacaggcgcccgccaccacgcccggctaatttttttgtatttttagtagaaacggggtttcaccatattagccaggatggtctcgatctcctgacctcgtgatccacccatcttggccccccaaagtgctgggattacaggcatgagccaccacacccggtgtccctccctaggtgtttttaatcagccatgccagtaacctggcagtgccactgggcattctgtaccccttattcccttcccctgctggggctgtgccaggagccacctgctcgtctcttcagggctgtaggactgccgtgttactgcaaaatgatcttcaaactcagattggatcctgtctgtcccctgtaggaaaccactagctcaccttccccagcagtctggttgcttagggggctgtcctccctccccactggtgctccaggctgcacaaagaggacctggagaggaactaggtggccccccttcatctcctcgctccctctccctggaatccctttccctgccttgtctgcggagcccactccctcccagcccaccctgtcactcaggagctgtgtgtgtgtcaccatcctgccactggtttgtttgctgtcccccacattggctgcagtgcctggcacatggcagggactcccttgggcttccaggatgaagggatacttgcttgtctattacattttccctctattggagaggtggtaactaaagactgagcagaaaggctggtaataggaaaatggaacaggactttggccatcattttgggaagctaccatagctctttccttccaagactcaataccagagccccttatgccacggtgggccaggtcctgcctagatttccaaagttgggatgggaccccctaccccctccccacccttcatccagggcttatttactgagtggctggcacttgctctttggggttcaaggcaccacaaacgttgtgttcattctgtgttgtaagaaccttctaactcccgcccaatgctggccatttctacttccccgaaggggcctcctgaaactgtcattgcagaattgtaactgagacagtgacagagttctgacctggccaactccatcctgtttctgacctccaagctgtctttgtccattcccgggcataggctgaactaattttaggaggaacttagtttatagtttgtagtttgacacaaatataactgccttttcccaaaacaaacccccttcttgcctgggacgagactgcctttataggactaacaaattagtcaaacatgttagaaattttggtttaggagtcatatccctagaggctacaagattctgatgctccccaagtagtcgctcctggtgataacatcactattgtaaaacctaagataagtgcttgagatattctgcagaccctgcactagatggatcagctggcaccactcaggttgataaactggctcatgtgatcttggggcccccactcgggaactgacctagcacaagaggacagttcagctccctatgatttaatctccaacccaaccaatcagcactcctgactcactggctgcctccccctacccaccaaactatccttaaaaactctgatccccaaatgctcaaatgctcagggacactgacttgagtaataataaaatttcaggctgggtgcagtggctcacgcctgtaatcccagcactttgggaggccaaggcaggtggatcacctgaggttaggagtttaagaccatcctggccagggtgggctgcagcccctcggaggctcactgcaacctctgcctcccaggttcaagcgattctcctgcctcagcctcccgagtagcaggattacaggtgcccaccagcacgcccggctaatttttgtatttttagtaaagatggagtctcactttgttggtcaggctggtctcaaactcctgacctcagattatccacctgcctcagccccccaaagtgctgggattacaggagtgagccatcatgccgggcaattttttttttaaaatatacatgggtttttgccatgttgcccaggctggtctcaaactcctgggctcaagcaatccaccctcagcctcccaagttctgggattacaggcatgagccatcacactcaggagtttgagaacagcctggccaacgtggtgaccaaactgcgtctctactaaaaatacaaaaaaattagctgggcatggtgatgcatacctgtcactagttgggt

SEQ ID NO: 94202 - DNA, 21127 bp, Homo sapiens
cagctccagaactttttcatcttctcaaactaaaaatctgtacttattttgttttgtttttgagatggagtctcgctctgttgcccaggctggagcgcagtggcgccatctcggctcactgcaccctccgcctcccaggttcaagcgattctcctgcctcagcctcccaagtagctgggattacaggcaagtgccaccatgcgtggctcatttttgtgtttttagtagagactgggtttcaccatgttggccaggctggtcttgaactcctggcctcaggcaatccactgccgcagcctcccaaagtgttgggattacaggcgtgagccactgcacccagcaaatctgtacttattataaacaataacttcccgtttccttttgtcctgacacccaccattctactttctgtctctatgatcctgactaccctatctcatataagtggaatcattcagtatttgtccttttgtgactggcttatttcactgagtataatgttctcacagttcatccatgttatagcatgtgtcagaatttcttaaggctaatattccattgtatgcatgtgccacatttcgctttcagtagtcatttttaagctctataaaataaaatgaagaaaggacagttcacaatctagtaatagccattgcctacctgtttttcttggactcttgttggaaatggtaggatcatgatttcagtcctaacagagatgcttgtggagggacagcctgtccctttcttggggcagcctcagtggggagaccatagcactcctaatggagtcacagatagtattccaaaaggagtttggtcctggagttgagtagttacacgcagggagggacctcacaacagccagactgtttctcctgctcacttaaccctgtgttgccccacacagtatcgtgaagagcgcttccgactgacgagcgagagcaccaaccagagggtcctatggtggtccattgctcasactgtcatcctcatcctcactggcatctggcagatgcgtcacctcaagagcttctttgaggccaagaagctggtgtagtgccctctttgtatgacccttcctttttacctcatttatttggtactttccccacacagtcctttatccacctggatttttagggaaaaaaatgaaaaagaataagtcacattggttccatggccacaaaccattcagatcagccacttgctgaccctggttcttaaggacacatgacattagtccaatctttcaaaatcttgtcttagggcttgtgaggaatcagaactaacccaggactcagtcctgcttcttttgcctcgagtgattttcctctgtttttcactaaataagcaaatgaaaactctctccattaccttctgctttctctttgtccacttacgcagtaggtgactggcatgtgccacagagcaggccctgcctcactgtctgctggtcagttctgggttcacttaatggctttgtgaatgtaaataaggggcaggtcttggccctagaggattgagatgtttttctawatcttagaactatttttggataaattatatattttccttcctagtagaagtgttactgcctgtaactagctcaaaataccaatgcagtttctgcattctgggttttgtttttcctttttttttttttttttttttttttgagttttgctctcgtcgcccaggctggagtgcaatggcgtgatctcagctcactggcaacatctgcctcccgggttcaaatgattctcctgcctcagtctcctgagtagctgggattacaggtgcccgccaccacgctcagctaatttttgtatttttagtagagatggggttttaccatgttggccaggctggtcttagactcctgacctcagttgatccacctgcctcagcctctgcattcagtttattcacatatttttggtaactcccatggcagctcctaggatttcagcggtctgtgggccagaaagcaggcaccagggctgacctcaaggccgtatcagagggccaagcagagttcttttggatacctgcttttcatcccacagggccttagagtcagaggtaaggtagcaacagagctagaatggggcaatgcactcttaccctccttctcaacttttatttaagctgtgctaaatgttttcttcaagggaaccagatttagttctttacagaattttccagtgaaataaaacatrttgtaatagctgtgtttgagatgaaataagaggttgtgggtagaggggaggcacctaaaggaaaagaggaaaggtgcctgggctacctatgcagataacctggagtggacttcactgtggactcgtggtactaaggcttggcctggacaggcagtctagggggtatgggaatacacggtgtggttgttcaactatttgcaaaggtcaaccaaatagaccacatgttcgcaaagtatcatctgaggaaattaagtaccttcttagccctctcagtcataaatttgaacaaattttaatacacttccctcatgcccttctatataaaacttaataccattagttccccattcttgacattttatttcagtttttattatatatttatttgaaatatttattaaattatctgacctacagaactaaattcttctccttttgttatttcttatgtcctataccatatatgtacctatttatatatatatttatgtatttttaaaatttttatttattttattttttgagacagtcttgctctgtcgcccaggctggagtgcagtggcatgatcttggctcactgcaacctctgcctcccgggttcaagcagttctgcctcaacttctgagtagctgggattacagacacccaccactacacccggctaatttttgtatttttattttatcttattcatttatttatttttgagatggagtctcactctgtcgcccaggctggagtgcagtggtgcaatcttggctcactgcaacctccacctcctgagttcaagagattctcctgcctcagactcccgagtagctgggattataggcgcccgccaccatgcccagctaatttttgtatttttagtagagacagggtttcaccatgttgaccaggctggtcttgaattcctgaccgcaggtgacccgtctcgcctcccaaagtgctgggattacaggtgtgagctggccgggcacaggtgatggggtcttgctctgtccccaaggctggagtgcagtggtgccatcacagctcaaagcaaccttgagctcccaggttcaagtgatcctcctaccttaccctcccaagtagctggtactacaggtatactccactgtgcctggctatttttactcttaaaaatacatgtgggctgggcacggtggctcacgcctgtaatcctagcactttgggaagccaaggtgggtggatccctatagcccaggagttcgagaccagcctgggcaacatggcgaaatcttgtctctgcaaaaaatacaaaaaatttagctggtggcacatgcctatagtcccagctacttgagaggctgaggtggaaagatcacttgagcccgggaggtcaaggctgcggtgagccatgatcgtgccactgcactccagtctgggcaacagtgatcccatctgaaaaaaaaaaacaaaaaaaaaaacgcaatttagggccaggtggggtggctcacgcctataatcccagcactttgggaggccaaggcagggggatcgcctgaggtcagcagtttgagaccaggctggccaacatggtgaaaacccctctctactaaaagtataaaaattagccaggcatggtagtgtgtgcctgtaatcccagctattcaggaagctaaggcaggagaatcgcttgaacccgggaggaggttgcagtgagcagaaatcgagccactgcactccagcctggggggcagagggagactctgtctcagaaaaaaaaaaaaatgcaatttagttctctaggcttttccatttaatagttttatatcctcctgtttctaaatctggatgacagtgtaacactccagtaaggtgaattgtgaattgctgaaattcttcagatgtttaaaagagttttcagtattcctcatgttagaattaatgcagagaaaaattatatcctttgaactagttacatgttgtggacttctggcctgaggctcttggggattatgtgacatattgggaagggacacatttctgctctgtggctgttactagaaatctagccagcaaatcagactacgtttgtgagaagacaggaaggcacagattagggttgagccagccttcaacaggtttggctggcagtagacacagtggagcacatcttaactattttggtaggtcctgggtttctcttggtagtttttgatagaaaggggaatggtgtgaggaaaaagtgggcatacatttcacctttccactgataaggcaggtggaattgggatagtcagtggatgggccaatagctggtggctgtgagaagaataaggatttccatactggtgtgtcatatttacagataggttgtgacctaaaaagttttttaaaaaacagcagttagggcctgggcgyggtggctcacgcctgtaatcccagcactttgggaggccgaggcgggcggatcacaaggtcaggagatcgagaccatcctggctaacaacggtgaaaccctgtctctactaaaaatacaaaaaattagccgggcgtggtggcaggtgcctgtagtcccagctactcgggaggctgaggcaagagaatggcgtgaactcgggaggtggagcttgcagtgagctgagatcatgccactgcactccagcctgggcgacagagtgagactccttctaaaaaacaaaaacaaaaccaaaacagtagttagggtacacacacacaaattctagtgattttccccccagtactacccttgacttttgaaattcctgctttctcagagtttacaacatccttaccaaacagccttctccctccttaccacaaaaaaagaaaaaaaagttctggggttgaggggacactccattcttaacatcctctattatcccagcccaattccccagctctcactgggactagttgtacctatcttcatcatttggtcccagcatgactacctgttggtgcatgagctgatctctcctaacctaacagccagatgctagtctctggtactcagatgctgggctgcatcagataggatgcacaggatcatcctggaagcttgttgacatagattcctgtgcaacactcagatatagtcttaatgtagatttgtgttgggtggtatggtaggtagaataatggcctaccactctgaaacatatgaatatgttacctaacatgacagaagagaattaagttgctaatcagatgactgtaaaataaattatcctggatcatctggatgggcctaatgtaatcacaaaggttgtttccttgccttttccagcttggctctggctcccttcctccagcaagggtgggttgagctctcacatggcaccactttgacctcttctgcttccctcttctacactgaaagacttatgggccaggagcagtggctcgcacctgcaatcccagcactttgggaggccgaggaaggcagatcgcttggccccaggagttcaaaaccgtcctgggcaacgtggcgaaaccccatctagaaagaaaagaagagaaggggaggggggaggggaggaggagttacatatatacacatacacacacacacacacgtacgtacatacatacatacacgctaactggacgtggtggtgcgtgcctgtagtcttagctttccaggagactgaggtgggaggaccacttgagcctgagatcgcgccagcctgggtgacagtcagaccatgtctcaaaaaaaaaaaaagatttgtgattaggattcttagtcctcacctgtattattttcctattgctactgtaacaaattaccacaaatttactggcttaaaacgacgcaagtctgtaggtcagaagtctgacacgggtcttaactggtgacccgagtcagatttgggacacaaagaacagaaaccaagctgtgcaggtttctgacaggcagtccggttagggagccctacagcaacccgccggtcctctctctcaggcagttgctgccatggctcattattccaaccggttctcctcagcccagtctatctcagtggctccattcatagggtgatgtgcccggcgggacactaaccctaaccaagcagagagacggtcatgcccgtcacgacctcggccctcgccccggccgaggcttctcctgcaggtcgcgagaatcaggtgcgtcagcggcgtccgggaacgccggaagagccagtggagcggctctgtagtccaaagtaccccgtcgaccccagcacggccgctccaccgcctcctactagacccagtcctagggactgcgcagtcgcagagctccgtccgagtaccggaagcctaggcgccagcacttccgggaagtgacttcgtctccgaagccgattggttgttgctttgctcccgctcgcgtcggtggcgtttttcctgcagcgcgtgcgtgctgcgctactgagcagcgccatggaggactctgaagcactgggcttcgaacacatgggcctcgatccccggctccttcaggtacacgcgagggctggggagccggcttacgggctctgcggggcgcgccatcgctcttcacgccgcttaaaccgcactcctggtctcctaggctgtcaccgatctgggctggtcgcgacctacgctgatccaggagaaggccatcccactggccctagaagggaaggacctcctggctcgggcccgcacgggctccgggaagacggccgcttatgctattccgatgctgcagctgttgctccataggaaggcggtgggtaacgagagagctgaggggaggaaggaggcaagctccaaaagcctgggaagggcggttcccgtttgtctgaggytttctcttggccctgtacccgtgcaggccggcctgagaacctggtgctgttgtggcaaacactctgggctggagttcaggttacctggatccttgtccggccctgctaccrccaacctttgcgtaatcttcgacaaascactttcttttctttcttacataaaaagggagcacatctatcttttctacttasagaattattgtgagaatttagcttcataactagtatatttaaagtagcttcataaacatcagagtacgttattctttttgagggtcagtgcctggggaaagaactctccactctgcattctgaggcgggcagagtgatagatgatcaaagtactgctragtagtgttgcagcagatgggtcaggtaggctggaaggggtagagacacgtggacacagtgatgtgcactgctggctaaagtctttaattcatattcttacagacaggtccggtggtagaacaggcagtgagaggccttgttcttgttcctaccaaggagctggcacggcaagcacagtccatgattcagcagctggctacctactgtgctcgggatgtccgagtggccaatgtctcagctgctgaagactcagtctctcagaggtgggtaaaagcagcaaagctgtacctgaatgaakctacacagtgttgtggggttgggtttgtgtgtggcaaaaaagagagcaaatccagggtgagatcccagctgctacattctgcctgatactgatgtcttgtccacctscagagctgtgctgatggagaagccagatgtggtagtagggaccccatctcgcatattaagccacttgcagcaagacagcctgaaacttcgtgactccctggagcttttggtggtggaygaagcygaccttcttttttcctttggctttgaagaagagctcaagagtctcctctggtaaggcagaggtgggtgtgattcctagtggaaacatctgtgagtaggagttgggacgagagcggggtggctggaagccagttactacaattagcggcccttggagctggaatctgattggattctttcatttcagtcacttgccccggatttaccaggcttttctcatgtcagctacttttaacgaggacgtacaagcactcaaggagctgatattacataacccggtaagaggcaccatggaagtgtctggagctgcagacatgggggcactcaaagatcytgatgctccttcttaggggattctttggtgttttgggtgggacagttgtcacttagtgtctcatccctggtcctgaggcactaaaagccagtggtctaaaatcactatatatttccaagtgtccacaagggatgtctcccatttcaggccatgctttgcctaaaatcctgagcaaggacctcccctaaggggcagctttgagcagcagagccaaaattctaaggccaaggttctcatcttaagtaaactttacctttcagaaggcctgttgctgtaggccttcccttctcaatgtagtcctttattgatgtgtttctctttgttctgtgcttggaagtattttatrtatggtttatatggtatactctatataccacaacaataagggcattttggggttttaggttacaaaactggaggagagttagggtgccaggaatccttaaatgcatctctgccctgcactaaaatgttgatgctttggttggtgagtaagtggccatacatctctgtgttcttttcctttctgaccacaggcctgttttctcccccaggttacccttaagttacaggagtcccagctgcctgggccagaccagttacagcagtttcaggtggtctgtgagactgaggaagacaaattcctcctgctgtatgccctgctcaagctgtcattgattcggggcaagtctctgctctttgtcaacactctagaacggagttaccggctacgcctgttcttggaacagttcagcatccccacctgtgtgctcaatggagagcttccactgcgctccaggtctgccacagccracatcttggttgaaataagttgaagatagagatggaaaggggacccagttaatgttctgtttcttaarcacttagtaggggccaggttctagatgtgactgatactgacttctcccaactccaaaatacctatcatggccgggcaccatggcttatgcctgctgtaatctcagcactttgggaggccgaggtgggcggatcgcctgaggtcgggagttcaagaccagcctggccagcatggtgaaaccccgtctctactaaaaatacaaaaattagctggacatggtggcaggcacctgtaatcccagctactcaggaagctgagataggagaattgcttgagcccgggaggtggaggttgcagtgagccaagatcgtgccattgcactccagcctgggcaacaggagtgaaactctgtctcaaaaaaacaaaaccctataattatttccagctgaggaaactgaggcacaatgattaagtagggaaagagattaagaagaggaaaaaggaaagggtgatggttactgtgatactagggatggcagaggggccttgagcttgctctgctgagctgattctctgtccrctcttggctgcaggtgccacatcatctcacagttcaaccaaggcttctacgactgtgtcatagcaactgatgctgaagtcctgggggccccagtcaagggcaagcgtcggggccgagggcccaaaggggacaagtgagtccatgcctctttttccatccctccccagaaatgcctgtgtttttagctttttggaagactaaaaccagagtgcacagagcagggagccaaaccttccaggcctggctggtagtgtagcccakagagccccacaggttcttgctcagctgcctggatatagagaagggagtggatggtgcacactgcacatgcaccacgaagggcaaaactgccggggttgttggcatgcagagccctgcaggggagatggcccatcctgcattggtggtatggctgtgacttgcagggagcatatttctgaagggaaaaggaaccccccaactctccagtctctgtccagctgaaggcttgactagctcagagttggttttcagatcaccatgtagggcaatgagttctgctgttgtcccagaacagaggtcaggccgagatttgggtacatgtcaaagctccaggctgccccaggaaaccctgactcctggaacggttccattgttgragagtcctctgtatgtcagggtcttaygatctacaggcatttagaggaagttttgctgattcagcgtgtgaatacgtgcccagaggagaggaagggtccrgctgacattgagttatctctgcagggcctctgatccggaagcaggtgtggcccggggcatagacttccaccatgtgtctgctgtgctcaactttgatcttcccccaacccctgaggcctacatccatcgagctggcaggtagtagtgtgacggcccaggcatctgcatggtaggcacactgagggacttggggtgtgctggacagagcctgcgggttggagatgcaagctgcactgtcttcccttgcaggacagcacgcgctaacaacccaggcatagtcttaacctttgtgcttcccacggagcagttccacttaggcaagattgaggagcttctcagtggaggtaagagcctggctcttgtggtcctgggccagggtcaggcttcttccacaatgctttaaaactccatgataatgatgacagaggtcacaacatagtgtgacaggccacttccaccatccatccttgttctgccctgagtggcaggcactgtcccccttgagagataaacaaattgaggtaatttgtccaaagttgtgtttactgtctgcctcatgagcgttgagtgacctgacaggctgctgtgacagctcaggacagcacctgaccccagggtgctgggtggtcctggactgctctctgtggccgtcgtcatgggggtaccttgactcccaaggaataccatggggtactccttgggagaggagaagagagtgggtgacsggttcttgggcttggggccacacaggccacccccatccacacacggggacagatggrtcatcactgtaagaggcccaggtgcagctaacctgcatgttcggcatcccaggaaggcggtgggtcccctgctgctttcccccaagggggaggtgcaggaggcctccaatgaagaccctatcctaaggcctcagcctgtgggaccctcgctgctttcttctccacagagaacaggggccccattctgctcccctaccagttccggatggaggagatcgagggcttccgctatcgctgcagggtgagctgctrtggtggggaggggaatgagaggggaggggctgtggcccagggattgcaccgtcttgctgagcatccaggtgtgaagggaggatttggggcagcctcactgtcttgaccttcagtgtccacccccaggatgccatgcgctcagtgactaagcaggccattcgggaggcaagattgaaggagatcaaggaagagcttctgcattctgagaagcttaaggtgagtggatgggaggtgagaaggggatagatcttagacggctgccctttttggagactggctgagctccgagtggtgagaagcagagaactgggcagttttctggcctttggcacggaaggggaggaaatggacccagaatcatggaaggaagccagtctgttctgcttggtggtaaattggcacaaccttatggtggacactgtccagcagaattacgagctcatgtgtcctttcatccgaaattccacttctggaacttaatcctggtcacgcttgtgaatgtgcacagtcaagcatgtgcctgcattcatccatccatggcattatcatggaaccaaaagatggaaacagcctggggccaccatagggggcttgctaggtaaactcaggtgcatycagagccgaaggttacatgggaaggaatgaggttggttgcgtgtccatatggaacagtctgtaagrtgatgcccagcaaaaaggggtacagggtactgccatgtgtgtcatggagaagggaaaatggaaacatccactcccgggaggttctgagaaatgcacagaagcagctgcctcatgccttttgaaacacatgagtgtgttatcctttgaaaagctaggtctgtgaagtcacagaagaaagatgctcactctgtggctctccctcttcccccggcagacatactttgaagacaaccctagggacctccagctgctgcggcatgacctacctttgcaccccgcagtggtgaagccccacctgggccatgttcctgactacctgggtgagtgtggcctgacagggcaggaggcagcaggctggggaagtggcattaatttctccactgctgggtcagcccctgtgcttggtgctggggatgctcaggcagaatagaacctggagaccctggcagcacgcgggcatgtaaacaggcacacccctgtgtttctaaacttgtttgcttggtcccacgggttagctgttgctgtctccattttagagatgaggaaattgaggtagtgcagggtgggtggcagacccagcatttcaggccaggtcgtctccagagctgggccaaatggccatccatgggtcgaagggagtgaacaggtttgggagagagtcacgggcaggaggcagagagagccacctgtgctgcaaaagactcaagattagcagctgctgaagaggcatctgtggagtctctgggtaagaacagtcagcagggagacagactctgtaaggcctaaaccgacaaggtagcaagagaagagccagtggtggtgcgagggatgcaggggttggcaggcatgaggtcaggaccctggrattggtttctgtagtgcagcccaggctagagctttatgtggccattaatactgggcacctctcctcatctttggcaggctctgggtaatgacttctttcagtgtctcataggaggtgtttttggtaatgagtatgtgtgacttttatgcctaaaatggattgaaggaggagagtggtggagaggaggctgtgggcagcaagtgcaggacccttcccaatgccacagggtctgctcagcctggacctgcagccacccagcgggtgtggtgttgctgctatggaggtgacaaagggtggagatggaatgttccagggcaggaaaagcctgggcactgggaaaggaaggatccagaagagatgggaacatgaaaatgccagagagagcggtgggggccgggttcccatgggacagtgagctggaggagaccccagtccaggtcctggcctgagatgtgaggaggggagttgggagggtgggtagggagggagaaggtaaggctagaactttggcctcaggaacccagtctgctcgtatagcggagtcatttgccaaggtgtggccaggaggtttagaagggccaggagaaggtggaaaggtgtcaggatgtgggatgtttgacatttgaaggggagggcccaggtgtggttggcctgggggagtccatggggtgggcgaggtgaagatagagccaagatcaggtgcagctgggatgcggggccccctgtatcggtagtaatgggccacaggtgaagaaactacctgttgacttttatttcagctgcattttctttctttaaggatgtctgtctttttctttcttgttacatgtttrttgtaacaaatctaaacaatataggagagtgatttaaatagtggaagtctaaggtgctcacattctcctggccctgtgcagatgtggtagtgaatagatgtatgtcataggctgccagttgsgtcagaattggagaatttgctgcagaatcagcrggagggcagggatgggagcagtagcggtgagcccactgctcaggcaagcatctcttccagttcctcctgctctccgtggcctggtrcgccctcacaagaagcggaagaagctgtcttcctcttgtaggaaggccaaggtacggctcctggggactgcggacagccccaggactcctcccaacctgctcttttgtcatcaccagaatgtggaggcgccttgccctagggaggggaagagagggtgccctagggaggggaagagggggcaccctagaaccgggccccaaaaatctggtgtgggataggggtacttttgcagccgcctgcaggccctgcttttctttccccagctgcctttccccatttccttatctgcagcaccttctggtcgtgttggccagttgccggcacggctccctttgtgtctttctcagttgggtgggtgggtgggtggattgtctgtcggcctgattcccccaactaacctgtgactttgcctccttagagagcaaagtcccagaacccactgcgcagcttcaagcacaaaggaaagaaattcagacccacagccaagccctcctgaggttgttgggcctctctggagctgagcacattgtggagcacaggcttacacccttcgtggacaggcgaggctytggtgcttactgcacagcctgaacagacagttctggggccggcagtgctgggccctttagctccttggcacttccaagctggcatcttgccccttgacaacagaataaaaattttagctgccccagtttgtgcctccagcatatgaaaaggactatttgaatccccaaaacatcaggagtcgggaaacttcggaagacagctgtgcctggctctgtggctgcatgcagtgcttcacttggccagcagaggtcagctgtgccgagctgccccagccatgagaagagaagcctgcccttgctggcaggtggctatggccggcccagagccttcctgcccagytcctgcagccctgctgcctgggatcaggctgggagatgggccttcctgaccgccagccttcctctccccgagcacacgcacatgtagattcggggggaagctgcctgctcttccttagaggagccggggcagctatctgctggtccctttctgaacaactgttgatgtgtgagctgtgtctgtgtgttatgtgcataagcggtggtgtgacatacacacatgtgtactgtcccttatgccctggcctgagctctccagctgccttctcagcctgaaggctgggcttctctgctggcttggggtcctagattgcatgtcacctgcttaccaggcgtcacaaggccatgctgggggcatgaggaggttggggcagcaggagagtggggagaaactaggagagtgcctgagtattttagaaagaaccaagttttttctcggcaaaagcttatacagagacgaaggagtctgtgtctttggtcatggtaggactgaagctagcaggacccgagatttggggcctccatgatccctgctcctcttctgttaacacccaaggatttccacgaagccagtgtgtatgatgggggcaggacagtggtactttctgggcaggtgtgaactagagctgctaaggagctgcagacgatattcttgcagtttggtggttagcagtattcagaaggacaaagagttaatggaactggagataaagagcaaccatttgagcatctgctgggagacatctgtcaactgcacagaccctatcagtgggcatcgctgccacctcttggaagacaagacagggcagagagtgcctgcagtgctgaggcctggtccttgccctaggttggccttcccacctggcttcatggagtgctgaggctggtcctggggacagtgagtgctctggatgttttagccaagctgtgttctaaagtgatgcacagtctgtctccactatgtttatctctctgaccctgtcacttccaagcacaccctaccaagagcttgtatcccagagccaccctgatggagaggagattggtttccccagtgatttcctttggggggtggggtagaggaacatggagccagccttatgctgtattcctgcctggggatagcagggtctgggcccggagcagaggagcttgggtaaagatatggcggctgtttgttcaaagtgtacattccttcctcctaacggcatccctgggggaagctatttctatgttttaggtggggaagatgaggcttagaagttgcctggtgaatgaggttctttgcaagatttgggttctggcctgtccaccctggtggagtagctggtaccacgggggcttttgctgtggggttaggcaccatgtgggcgctctggggccagggcattggaaagaatgggaggattgcttgagcccagaagttcgaggctgtatgatcacgcaactgcactccatcctgggcaacatactgagacactctctctctttttttttgagacagagtctcactttgttgcccaggctggagtgtggtggtgcaatctcagctcactgcaacctctgcctcctgggttcaagcaattcttcccgcctcaacctcctgagtagctgggattacaggtggccgccaccacgcctggctaagttttttatatttttagtagagacagagtttcaccatgttggtcaggctggtcttgaacttctgacctcaggtgatccacccacctcggcctcccaaagtgctgggattacaggcgtgagccaccatgcctggccgtgagactctatctttaaaaaataaagaacaggaaggtccatcttcgtgtcctgagactacagagagaaagtaagtataaatggctcgttcaacaccccacctgggaggcaggtaccatgtgcccatttacgtgtgaacaaacaggcactcagggttggcctcttggacttagtctggccaaagcctgtgccctttgcacaaatgtgcaaatcaggactggggcaggccttggatgagggtatgtgtgctatgggcaaatgaacctagggctgtccagggccaaacagcacagagggcatgtgggcctggaagggaggaaggaggtgtggcacatgctgcgtggaagcctaaggcttcactaaacagcagagaagcttggatggttttcaggctggtgacgccctgggctgaagcaggaaggtcaggagaatgcagtggcctctccactctgggctggcacagttttgcccacatgtatacctgaatgggtgcctggctgtgtggactgtgctatggtctggaatcagatggacaaggcacagtctatgaggcaaggagcagagatggtcagccaatgcagactgctcaatagtcatgttgggagttcagggtactggagggctataaggggccctcacccagttggagagaatgctgccttccttgagaaagtgaggtttatgctgagatgggaagggtgggagggaacagcaatcctagcaggggagacagcatgtgcaaattccctggggtgggagggatccctgcacatttgagggtgaaaagaccagagggttgttaccaaaatatgcaatgggggctgaaaatttgattttttaaaaaaatgtaatagtcacatattaaaaattcaaaggatacagaagatggagggtttttgaaaacaagggcattctttttcttttttctttcttttttttttttttttttttttttttttgagatggagtcttgttctgtcacccaggctagagtgcagtggygccatctcggcccagtacaacctccgcctcctgggttcaagcgattctcccgcctcagcctcctgagtagctgggattacaggcacccaccatcatgcctggctaatttttgtatctttgtggagatgggatttcaccatgttggccaggatgaactcctgacctcgggtaatccacccgcctcggcctcccaaagttctgggattacaggcgtgagccaccaaacccggccaacagcattctgatgatatagctggtgatagcagatgggaggacagtggtgtgcccagaaacctctggacctggagcacaaaaggctcagggtgcattcccagcccagcggattctctgcctgcatctgctaaggatgaatgactcagctttgggggaattagttgtgagactttggacttcaggggcggggccccaagaggcaatggtgataaagttgaatttgagcagggaaggtgccccgtcagctgtcatccttttccccaggaacatcattatgtaagactcctgccttgtggaacaggctgtgagttgctgctcttccattcctcacagccatgtttacaagggtaaggaagggaaggagtggttcatcattgcagagaggaaggtgccttggccaagcagacctgctctgtgccaggcatgacactgggcaaatgcacagtatttagtttatttatcctgaaatgctttcagaactcaatgcatccagtgtcttgttatccctccagcctatccgcaaacctgctgagatgcagtaggtttggcgtagaatgcactgagggtatctgtggcaacagtgggctaaagaacaaggcacatcaagggggtcttccgacgaacaccccaagggttgcctccaccacgcagcatcctgctgtggctcgcctcaatgtcccaggtgctctgtgggcacagtggccaggtcagaccatgatggccactttctgactgtatggtctcatacagggaaggcatgtcacttttcttggccttctctaggttctcacctgtaagtgggggtaaaatgtcccctccaagggttcctgtaggggccgaagtggctcaggcacctggcacgcctgttgcagcccagctctgtgctagcacctcccaatgcctgttgaatccaccattgccttctgggacgtgtctccatacttccacgagaatacgtctagggcacagcctggggttctgcatttgagttctcacctccgtcccaggtgagcccaaaggtgctggtctctagtccacatttgagaggcaaggctttaatatccaccacacacatttattttgcagattggcaaaagcttagattaactagccagcccaatgtcacttggctaagtggtagaggggaggtgctgtgtctgtcagactctagtctggaattggaggtgggatacctaggttcaagtcctggatatgaaacttccctgtcacatcccttctctgagcccaacacttaatccgaaagtcatggtgacgtgggaggccaggtaaagtaggagatgtctagctagattggaatttcaaataatgaggaattttacagcataaccgtgtcctgtccaatatttgggacatatgctaaaacagatattcactgtttctctgaaattccagtatagctgggcatcctgctttttatttgctaaatgtgcaaccctaggttgtgagacctctctgacccayrcgtggcctcctccaggaagtcttcctgagcgccagcctgggctgggcatcctcctctgtgtgtctgatgctgctctgacctcatgaagctctaattgctggggcctgtccccaccttgatgtgggagctcttcggaggcaaggaccatgccaagttgcatatctgtgtgttcctgagtccagtggttcattaaaagcttttccctgagagtatccttaatgccccggaggtaattctcttttcacaacctttctactgcctgaggctcttgaggactaattccagttaaaagcagagggaaggatgtggtaggaatagcaccgcatggagctggactctttgccccccgtgcagcaggcaggaccctccctctcatggccccttttgttccccacagctcactgtacaacttgttggttcaaggttagaaaatgcagttttgtgttgagggggaccatcacagaagacaaagggtccaggatgaaggctacccatcagcttgcagggctgggacgaatgtgagaagcaactgatgcttgtacagtagagagtaagcatgtagggccagtccccagaccttgcctcccctcagccttgacatgtgatctccatttctggtggctacccctgctagtggtctggcttcaccatcttagccctgcccaggctaagaccctcttccatcagaacctgcagctgggatgctgggagcaacagtcagggcagagctgcccatcctcccattcagggagccctcaggaagtacttgggaccccccgaccctttatagattcagcctgcctcatcccctccatggaccaacacgcccttctcctcagcagtgggctgggggaccaggctcctgaactgcttgtggctgttccagcagtggggagatggagggtcacacagtcctgagtctatggctttgacagcaacgggtcctgactgcagctgtattcgtgaagcgaagtacctaatacaatcaccgaaatgtacaaattggacccctataggttcaaggattcttggtgtaggaggtatggcccccgccccgggaaccaggacctcagctttcagaagcaaaatgcatgaatgcagtgatggttaggccaagtgccaagggagacagccaacccctgctatcatggccagaggagggagagaccactcaggcctgggtggtggtagaaatcctcactgccaaggagattgtatgcgcaggcgttgggaaggcccggagaagcctgagagacaggcttggcttggttatagcagagctgggtggagggagcagattagttggcttagcacaggcttcctgcagggtggtggttctcggccagatttgccccagtggggcttttgggaaagtatagaaatattgttgtttttttttttttgagacagagtcttgctccgttgcccaggctggagtgcagtggtgtgttcttggctcactacaacctccatccacctcccgggttcaagtgattctcctgcctcagcctgccaagtagttgggactacaggcatgtgccaccacacccagctaatctttgtatttttaggagatggggtttcaccatgttggccaggctggtcatgaactcctaacctcaagtgatctgcccgcctcagcctcccaaagtgctgggattacaggtgtgagccactgt

SEQ ID NO: 94203 - DNA, 22860 bp, Homo sapiens
cttctctctgaggagcactttacgtggaagagggcgtttgtaacccaggccagaacagtttcatattttttggcctggtgtgagagacttaaattccctgggatttggttgctgcaattcttcttttcctcggcaggttttaagctctgcagcgtcactccctggctctgaactcccctcctccaggcctgagggttcccagggaggagaggtaaggagtgccgacgccagggccccccgcagcccaggcctccccagcagctcactgtccaggcgcctcttcctttatggaggggcggtactgggtaggaagaggcagtttagaaacaagagcacctcgaaggtggtgttcctgggggaaaaaaaattgcacttgttttaacaaaactgtttgggagctccaggaggggtgcagggggtttgagttgtcgcctcagtcccggtcctctcccttcaacagcacgggaattgtcttgaattgtgaggtgtcaggaggtgaagctggcttaggccgaggctggacttttcctcccagccctcccctaagctaatggttgtttcgggataacagctttacattaagacaggaatcttaagctaacactggcttttttttcccttttgagttatgttgattctaatggcatcacaaagcttttgaaatggaactgacagcttggattggacagtgacgtgcatgttgactttcgtccgtgttttatgtgtgttcttgctgttttgtagctttcgcgctgtagttcaatgagttcattatcacgtgaagtgagccagcattttaatcaggtacctgcggctggtggtcctcactaacatgagagctggcgtgtgccgcctgtgttcctgagcacgcggtgccggttcgccacgtgcgctttgccactaacctcgcccgttgtctccctcagcgtcacgtgaccaagggtacagggttccttttttttttttttttttttttgagacggagtttcgctcttgttgcccaggctggaatgcaatggtgtgatctcagctcaccgccacctccacctcctgggttcaagccatcctcctgtctcggccttcctgagtagctgggattacaggcatgagccaccacgcccagctaattttgtatttttagtagagacggggtttctccatgttggtcaggctggtcccaacctcaggtgatccgcccgcctcagcctcccaaagtgctgagattacagcagtgttcctttaaatggccttaaagggggttttgctgttcagtctccacatacatggggcaactggatcgaccctgaggtgtcctagtcaatgagtgggttctgtcattttgctctttccaaattggtttttccaatgacgggcctgggtcgtggcctcgccgagtgagtgtttccccggtcaggatgctctcctttggaaggaagattgctcctttctgatcaagcatgagaacgttggtttgaggccggggcgggtgcagcagtgacctgcggccaatgtgggagggaggtgaacgaacgcttcatcttctgcctgtccaggcaccagctgcagccgtggctcagcagaaaggcttgcagcgacccttccgcctgcaaatgagagccctgggcctcgtgtcatggctggagccttagagctgcagccgtgggcacctcctcaccacctcgcacgctcggtgccacctcagtgctgtgtgcaccttcccattgcatgttccggtgcttaaaacattggctctgcacgttgctttgattttcaccatttttctctgaaccattaaataactaaatccagtgttgcaagaagtgtcttggatctgcttctgtagcttatgtaaaagtactgtaaatcccacccagaagcggtgtctgtatctgcacttgaagtgacagctgctgtgcagcgcagccctgctgaggtgacttctctgtgcttctcaggctcctggcgacctccctgctgcagggggccctcccagcggggccatgcccttctacaaccctgctcagctggcacaggtgagtgactcctacctttccctacgagaccctaacacgcccactgacgacctgaccctgctgctcagtgatggcagctttctgccctagatcctctttttctttctttttaaaaaatatatttatttatttattgagacagggtcttgctctgttgcccaggctggagtgcagtggtgcgatctctgatctcagctcactgcagccataacttcctgggctgaagcaatcctcctgcctcagcctcctgagtagctgggactacaggcatggtcagcacacctggcaaattttttatgttttgtagagacggtctcaccttgttgcctaggctggtcttgaactactaggctcaagcgatcttcccacctcggcttcccaaggcactgggattacaggcttgagccaccgtgcccagcttctcttttctgaatgaaagttgcacacctactgggtggcagtccacagggcactgtgaggagccaggctgggccctccccggctgccatttctccctttgtgtggacaccaggcccgccgtgctcagctctgcgtggacaccaggcccgccgtgctcccgtgtggagctctgtcgacacgaggccctccgtgctcctgtattcgctttgccttttcctaggttgtagtttgtaaaatgtgcttggctttctacttgtgtatccctcattcagcccccagctctgccacgtctgctattctgttctcctggagcccgtggtctctgagccgagtgtgatctctcctcccttggcccgggcacccgggtctccccggagtgggtcccccagctttggaatcctatgttgctgcctttcttagttactctgtttgtcttggtgacacacatcctctggtagctcttgctttttttgtatgttttttatttctttttcctaatagcttcttgacagaaaggtcccagggtgacttgggagatgcctttcacgtctggagctgcctttctcctccggcctatctggctggctggtagaattcttgggccaaagtcactttcttcagaactgcaagtggccttaggtttcctgctgcctgtggttgctgagaccccagggccgttctgcctgcagcccctttcagggtccgtttccctgggacctggagggcttcaccctcagcccccttgggcctgactgcatgcccttcagctggggagtgttctagaatgtttcctgtggtttccctccctcagcctcgtctctcctcccctctcccttgcctgtggagtatagactggctgccagtgtaggggagctgagcggggtccaaggtctggggcctcttgggattcagccccattgtcaccccagcctgccctcacagcctcacacactcttgactgcaggcttcctgggctggggcccagcactcctgccctggtcctctacaaacgaggccgaggctcccaggaccactgcccccaagctggcccctggctgtcacctgcttttcagcatccagactagtcgattttggtattgtcctgctccctttaccatgtggttagtgcctttacaaaaattccttggctttcccctccatgaggctttgcgagggagcaagagtggatgcctgcattggccagctgtctgcaactgaggtccccgcgtcccatgcagtaggccaggcctggccaccacttgtccctggactctggacagccaggctggctctgcagagcagctccaggtctcatggccctgatgaaaccacggcacctcctggccaccctcacagtaaacattgatggttaaggatacagtgctttcaagggagcccaggacttggcactgacttgtcggtttccagaggcttttggaaacaaaaacgaagccttcagcttgtcagcgccaatggcccgtgtggttcattatgtggaccagcccctgccacgctgcagccgagcactgctcaccctgggggcaggcatgcagaggtcatgctgttgatttcattccaggcctgcgccacctcygggagctcaaggctagggaggattggccagaggaagcacctggtgctgaactaggcttgccctgctgtgaacttgcacttggagccctgacgctgctgttctccccgaagaacccgaccgacctccgcgatctccgtcccgcccccagggagacacagcagtgactcagagctggtcgcacactgtgcctccctcctcaccgcccatcgtaatgaattattttgaaaattaattccaccatcctttcagattctggatggaaagactgaatctttgactcagaattgtttgccgaaaagaatgatgtgactttcttagtcatttaggatgatttaaggatatagtattcctggtcatttaagaatgttcattcattgaagccggagctgtctctgccacaggagagccacatggtcggtagtaaccagggcctctccaagcccagctgtgagtcactgcccagtgagtcccgcgcttcctttaaggtgctgggagcaaagagagggtgactgaggcagaccccaacccctgctctgcaccatctgggccctcgccgtgtttgaacctggctgaatgagtggagggcgctgtgttctcaatcagcgcctccgaggagccgtggggttccttcggcattagttcacggtttttgagagaggccctagttactgcagtgaatttctttcctgttgcaaagacgcttccagcctcactttactttctgtggcctgatgaggaccatgggtgattttgtgtacccaaagcgctggggactgcccaccgtgtggcccagtcactgggaaggagccccagagagccggctgtctgacatgatggctcagggtggtcatccaggttgaaaactgaccgtgtgatgtttgatttgggcttcatttcgtgtgtaggagcacggttagactcactgttaaggaagctggatgcacttctctaaaaggctgcactttccgtgagcacttttcgtggtacaatccacatgacccactttctcccctgggggacgttggttcagaggttggtagcacttggggagagtatcttaacacagtttcttgacagcagctctggaacttagtatttctgccccgagttttgccacactgagactttgagtagctcctggtggactcaaccctgttcaactcagagacgggcctcctctcactgatgcaaagctttaaggcttctctgactgttctgaaactcttcgtattcttgtcaagtctaaagagactgaagaaaagatttaaatactaataaaaatcagtagataatttctgtaggttctgctggaggaatacaaactgtttggtgttttaaatttaagtgtagaaattgtagaatgtggaattagcacagatccttcctggctttctgtttcacttgatcatttagcccagaccacccaggatgttttccaaaatgttccacaggcgtgtcccgctggatccatttgtccttgtcacttggagaaaggccagtccctgtgacggggcagccctctctgtccctcggtcagctcgtgtgaatcctgggacctcttccggtcggctctgcccgctgttctggggtcgactgccacgacttttgattcaagaagcttcctccaggcgggagcggctatttttcctaaatgagaattgttacattgcaaattgttgaataaaatattttgcgctccttcaagcaccttcacctgtggttccctttggtttgctggaagcgagtgagtgcaggtgtccgcaggcctcggcgctgtcctggaccgcacccaggtcctctccggggacctgcacctgcctcgctgggacctgccggactgcggggctgccgggttgggaggggcgtgggagacccgtccgggtccggtgcggcgcagtcctccggccgccaggggccgctgtgggcggggccggggcgcggggcggggaccgggcgcggccccgcggcggcggttgctgggtcccggccgggctgactccgcttctgggcggccgggcctccgcgagtaccgggtcgacttcggagtctgcgagcccagccaggggtgcccgcttcccacccctctccccgagcggcgtccccgtcggggtcgaacctcccccgcgacaggcgcccagccgcctgttcccccaggccttgcctgcggaccgccctgggaacggcgtctgggagccccgaggggctggcgggactcggggcccgggccatgcggcagccgcccccgcccctccgcgaccatccccggcccaagcgggagccgcagcggcgtttctgctcctcgctgcgccggcgaccccggacccggcacccgtgacccctcgcgctgcctgcggcctcgcgccgaggcctgccccgggagagaccgtccatgccgtccaaggcggagaatctgcggccctccgagccggccccgcagccgccggaagggaggacgctccaaggacagcttcccggcgctccgccggcccagcgcgcggggtccccacccgatgctccgggctccgagagccccgcgcttgcctgcagcactccggccacgcccagcggcgaggacccgccagcccgagcagcacccatcgccccgcggccccccgccaggcctcgactggagcgagccctgtccctggacgacaagggctggaggaggaggcgttttcgaggcagccaggaggacctggaagcccggaatgggaccagtccctccaggggctcagtgcagagcgagggccccggggcccccgcccacagctgctccccgccctgcctgagcacctccttgcaggaaatccccaagtcccgcggggtcctgagcagtgagagagggagcccgtcctcggggggtaaccctctctctggggtggccagcagctccccgaacctcccgcacagagacgccgccgtggcggggagctcgcccaggctgcccagcctgctgccccsgcgcccaccgcctgccctgagcctggacatsgcctccgactccctgaggacagcaaacaaggtmgactcggatcttgcagactacaagctccgcgcgcagccgctcctggtgcgggcccacagcagcctgggccccggccggccgcggagccccctggcctgcgacgactgttcccttcgctcggccaaatcctccttcagcctcctggcgcccatccgcagcaaggacgtccgcagcaggtagggcctggcgggtgcagcgcccgcgccgccttcgttgtagtgttcaggctgctggaacctcgtgagaccgttcccatcagcagcgtttaagatgcctaaccggaaagaacgaagcgggtctcccgcagccaccccatctcccagccccaccccacagcagcgcccttcccagaacttttcctgtgcgtttcagaaccattcgtgggcgtgacgttgtgttaaggtagacaggatggcatcctgcatacaattacgtatctggcgctttttcttgtttagtcttgggaaatgtcgtcaatgtatacgatccgcccctttggttgtttttgtttgttactctctctgtcgcccaggctggagtgcagcggcgcgatcccggctcactgcaacctctgcctcctgggttcaagggatcctcctgccgcagcctcctgagaatctgggattacaggcgcccgccaccacacccagctaaattttgtatttttagtaggggcggggtttcgccgtgttggcgaggctggtctcgaactcctggcctcggcctcccaaagtgctgggattcccggcgtgggccactgcgcccggcctgccccctttgtttttttctgcggcaagaggccccagatgtgttgaggctactttcgtttagccacttgctcatgaggaacattttggtgggctccagctgttgctggaaggaactgcagctgaacccatgacctctcccaagcctggtcttgtcttggggtctcagtctgggggcctgtcctgagatgctcccactatgacttggcagagtcacctgcacccttcttttcctccccccaccccactgccatggtgcccaagtcttgtctgtcagccgcggcgggaggcaggacaggtgtgagaagggagaggtgtgaggtggtttctgtgttggtgtcctggggccgttgtaactcatgaccacagactgggaggcttgcaacagcagagctggactctctcccagttctagaggccagaagtctaaaatcaaggtgtggccacgcagcctctctccagaggctcaggggagggtcctcccgctgcctcccgctcctggggccccacttgttccttggcttgtggccgcatgctccagtctctgcctctgtctttatgtggcctcttccctgtctctctgtgttcccctctctttttataaggacaccagtcattgaatttactgcctaccctaaatccagggtggtcttatctcgagatccttaattaaacacgtttgcaaagaccccgtttccgaataaggtcccattccaaggttmtggggctctgggagtggacatggctttggggatcactgttcagctcaccacagtccccgaaggtagcctcacttccccgcgtctgtggtgcaccagcaggcaggtgggctcaggcctggagtgagggcccgtgcctggcgcccccaccatactctcctcctgtcatggatggagcaggtgcgatcacatccagggcaagactgctgcttttgttaaaataattcactgcagggcttctcgtaaagagtgagatttcttagtgcatctaaagcatcacattttaaaattagatccggttgacgtagatacacctgttagagaaaaggacagtcgtgtctcaaatttggaccctcaagtcattgttttcaaacaaccaggaaacgagggttgacgtggatcctttaacccagttctgctgcctaacagcttcccatttccagacctccggtctgttctagaataggagtcggcgcactctttctgtcaagggggagacacagacagtggggaccaaagggcgtstgtgtgccagtgagtctattagggacatacattggaacctcgctcttttttctttctctgccgttccacacagtaaaacccattctgagtttgcgggccgcgtgtgcacgggctgggtccgccctgtttgagaatggctgctggcttttgccagtgccttggggctgccagggcgggttagggggcctttccccacccgttccttttgctcggagagctggcccaggctgtggcagccagcctgagcgtcctcatgcagaagctgtgcagtgtcctggccctggatgggggtccgaggcagctctgcccctgcccgtgtctagacacaggaatggctgtgagggccgcccctggcctgctgttactaaccatgctctggacagagctgggcagactgaccacgtggctgctggtgtggacatgatgggcgctgccggcaaaggggccgtgggcctccagcctggtgaccgaggagcccctgctgggcccgggatcacttgacaggggtgcccacaggaaygctctctgtcccgaatgaccactgtgtgaacacagctgtcccgaccgggattgtcgacagttttaggggtgaggtagcgaggttcctccctgctgacatgatttaatcgtgtccagtgaagcttggtgagccgcagccagggttgaagaagttctcgcgggaggtcacaggaatccggcactatgctctcgtgtccccttgcggaagggaaccatgtcagaagacggcgtatccagaaggagccgcacaagtgttacttagagagggagcggggaggacggctggcaagcctagcccacggcgtttctgtatagtcggcgagctgagaacgggttttacatttccaaatggttggaaaaagtcaaaaccattctaatgatgtttcatagtacaagaaaattgtaaaattcagatttcagtgtctgtaaatcaagcgtctcgggcacacggctgcaccccttgtgtccacatcccctggtggctcttgcaccaccgtagcagagcccacggcgacagacactggatgtcccacggagcggcaggygtgtgcggttgcctcttgacgggttaccagccctcgtggcagaaggtgctgagtgtggggaggggcagggaygttgctgtgccacacggtgtttaaccatctgtgtgcaccgccgtattaaaatctgaaagcatcagcctggacaacgtggcgagaccctgtttctacaaaaataaaaaataaataaataactagccgggcgtggtggcactgcacctggagtcccagctactcgggaggctgaggcaggaggatcacttgagcccgggaggtagaggctgcagggagctgtgttagtgccactgcactccagcctgggcacggagtgagaccctgtccccactagaaaccaaaacaagcaaacccaaaagtgcgtcaaagccacggggtgtcgaggagatggacgcgtttccgtgtggctcgtgtggtctctgtatcttagaccgtcctgcctggtgctggggccaaaggagaaaggaggaggaccagcccctccccgaacagcaccctgtgcccactgccttggcttatagtttgggagctcctctctgtggcttttccaggatcccaccaccaaaaagcccaaaccgtcaccctctcatgcctcttcccgggaggtagggagggggtgtgaacccgctctgggtgtttgtgcaaccaggtcaggccttgtgttcctggagagcagacagcagtgccgcgggggccaggagagtccttgcttggggctgggggcagctcctgacattccatgggttttgctattgtccctggggacctggcccagacccccagggatgtgtcctgtgcctggccctgagcttggggtcctcccgtcacaggagttacctggagggcagcctcctggccagcggggccctgttgggggcggatgagctggcccgctacttcccagaccggaacgtggcactcttcgtggccacctggaacatgcagggccagaaggtgagtggctgtgggtggtgctgggcggggaagggtggggtggtgctggacaaaggcgggtgagggggacggggcagctctgtgcctcatcctggggccaggagggcagagccccgaggtgcaccccactgctaaccgcagtacaggagggtgagagtgggtaaggacccccatcccccagagctcccacctgcacctccctggccacgtggctgcagaaagtaggggagggggttggggcaacgggcctggccgagaatcacctgctcaaggtgagcgggagggcggccagcggggcacgcgtaggggtggctcagggacagggtgggcagcacgggctggggtcatggtgacgggagggtcatacaggggtggtcgttggacagactcgtgcttggagagggaaacaggccgagggccaacgtgaggcgtgtttggtgtgtcagaggctgcctcggagaccgggcagmtccctttttggccctggcctcagtttcccctcattcggaggagtcgctggtactcaaggcaccgcagtgggattcacccacaggcgcctgcaggtttcgggaggagccggcccaccacatgctccctccttccaggagctcccgcccagcctggacgagttcctgctcccrgccgaggcygactatgcccaggacctgtatgtcatcggggtccaggagggctgttctgacaggtagggcggctgcaggccctgcagtgcctgcccaggggctgccgtctctgaagcagctgggtgctgagacctgtggtcatggctgggcacgggtctgcagtgcctgcccgggggctgccrtctgtgaagctgctgggcgctgatacccggttcgtggccgggcacagatctgcagtgcctgcccgggggctgccgtctctgaagctgctgggcgctgagacccgggtggcggccgggcacgggcagcctccacgcctgggtgggaggcatgggtcagatttttttccagtggcaactcggagagtttaaaatcaatgagatttgattttggtaacaaactgttggcgtgcgagagtagaagggcagccggagcagggccgggccccaaggcctcccgggcccccatgtcatggcgggaacagcaggtggctgccgcccacacaggtgctctgggggaaggagttgaggtgggccccacctccctggcccatgagtccctcaggcgggaggagctctgctcactggggtctcggcgggggtccaggggagccactcaagtggaactggggcctgtggcccccggcaggtcccaactctggcccaccaggccttctggcaaatgcttctccgcgcaagacaccaaggccaggtcgtggggtttccctggtagctcctcgaggggctctgggcagcaggtctgggggtggcggagctgggaggccatgtcccccagccggccgtgcttcctcctctgcaggcgggagtgggagactcgtctgcaggagacgctgggcccgcactatgtgctgctgtcctcggcggcccacggcgtgctctacatgtcgctcttcatccgcagggacctcatctggttctgctcaggtgggcgcggctggaggggtgggcgcggcwggaaggtggcagcgtcccacaggtgagctgagggctgcccctcccacagaggtggagtgctccacggtgaccacacgcatcgtgtctcagatcaagaccaagggggccttgggcatcagcttcaccttttttggcacytccttcctcttcatcacgtcccacttcacctgtaagttgcttggtgcccgcaccgcaggtgctgtgtgagaacagcttcctctcctgaccgggaccctgtccaaggcaggggtcctgaccgctggcttcatcttccacccagggccgtggggtgggcaccaygcttgctaagatgcacgccaaggaccccyggcagaccccggcaccgagggcgtgccgtgctgggcccgtgctctgtcctccgaggcggaaatgtcactggctgggcccggcagcggatgcccrgtggggttgcrtctgccgggggtgcgcagtcagggcacagtccagaggtgcggcgctttagggagactcgagcatccggaaccctgtggycyctaccccatttctgttcccacagcaggygacgggaaggtggcggagcggctgctggactacaccaggactgtacaagccctggtcctgcccagaaatgtgccygacaccaacccctatcgctccagcgcaggtgagggcgtccacgctgygtgtgggtggtgccgccgtggttcgcacacgggcgcccgtcgtttttagggcagttctgaagaggcagcgtcctgagctttgggaagcgagggccgaaacgtccagtgcccccagcgcatggcccctcgcggttctttagcacggttagtggggtgggcggatcctgtccactcggcgtggcccactagcctgggtcctggtcctcgccactgcccgccccgccgcctcccctggctgtgtggagaggagcagggacgtggccatcgcctgccatgggcatcgtctgctcctgaggctgctccaggtgccttctggaactgtcccagtgcgaatcccacccctgagggcccggccccaccggctggcgcccaagacccacttcccctgagagccactcccaggccatgttctggggaaggggaaggacctgccgtccctctgcctgtgcccacacatggcccactgtgccgcagcggacgtcaccacccgcttcgatgaggtgttctggtttggagacttcaacttccgcctgagtggcgggcgcacagtcgtggacgccctcctgtgccagggcctggtggtggacgtgccggcgctgctgcagcatgaccagctcatccgggagatgcggaaaggtgagggcctgggggggcgggcatggagggagatgaggagaggtgagggcctgggggggcgggcgtggagggagatgaggagaggtgagggcctgggggggcgggcgtggagggagatgaggagaggtgagggcctgggggggcgggcgtggagggagatgaggagaggtgagggcctgggggggcgggcgtggcgggagatgaggaaaggtgagggcctgcggcgggtggggggagggtgggcgtggtgggagatgaggagaggtgagggcctggggtgcggcggctggcacaagctggtctgagccagtccgagtgcccatcctgtggcagggtccatcttcaagggcttccaggagccggacatccacttcctcccatcatacaagtttgacatcgggaaggacacgtacgacagcacctccaagcagaggacgccctcatacacggtgaggcctgcccaccgctgcggtgcagagtgcttccagggcaggcatctcccacagccgggaaccgatgcctggcgtcaggggtctgagcctggacggcctggacttgaaactcagctctgcaccttggccttgtggcaagtcccctttggtggagaacggcgccctctccatgggtgttttcaaggctgggtgagccggctggcacacagggcaccagccatgccctcgcctccggcctgcagagcctctgccctctgccygttgcaccctcgctcaccctcctgccaggcccatggctgcatctctgggcatgtcccgatatctggatatctgctggaagcctcaagaagccactgaggcagggcagggtaggagcagccgctgtccacagggtctctccagcggcgagggacaggccctggcccagctggccacagacgccaggcaacaaaatgggcatgagtgtcaggggtcccagaaggcttccttgtggggggcgcttgagaacagcagggaggtgagcgggccacgccccacggctcctcacaagtaactggacctcctgcctctgcaatcttcccaaaggaccgcgtcttgtacagaagccgccacaagggtgacatctgtcctgtgagctactcttcctgccccgggatcaagacgtccgaccaccgccctgtgtatggcctcttccgggtgaaagtgaggccrggkcgagacaagtcagtgttctcccgctcaccttcccccttgggcctgggggtcgtgccrtcrtcccatgagctaagagggtccctgtcatcgtggggttccacttggggctttgttctgggaccttcagggctgtgttccccgggatcggttggactcatcctgragcaggagaaggcaggaaggggagaggctctggaaagtgaagagaggcccagctggggggctgggtgtggccagctggagggacgaaggccttaagcactcaggcatccgccctgtccttcctgcggctctgtcccaggaacaggcctccgtgtgcttagaggcagggccaatctgggccagtgcccacctaacagcccctcatcctggccctgggtgtcctcttaaatgccccctcctccggggccggccccctcctaacgccccctcctcctggccctgggtgccctcctaacgccccctcctcctccacagcattccgttggcagctggcaaatttgatagagaactgtacttactaggaattaaaagacggatttcgaaggagattcagaggcagcaagcactacagagtcagaactccagcaccatctgctccgtttcttgaagtttgctgaacgaggactcacagctgcaacgtggggtgattgtattgatcaaaacccactgggaaggacaaagagtttgccgcctttcggggatccragggactgtggcgaccgtgcctctgtgccagcgtcccaggaaggaagccaaccctgagcgagcctgtcctctgtggcaggtccacacggtgtgggtgggcagggcttggacccccgtctccatggcaggtccatacagcatgggtggcagggtttggacccgcccagcagcaccacggaccccagccactctcgggggcagacgtcagaatccgttcctgagcagctccygtgccctgggggcagtcacagagccccccaacacccccgtgctctgcaccagcctctccctccacacccgaagcaggcgtccatctgtgtcctcctggcagcccctcaaacacacaccaccccatgtcacacgggtatccagagcaaggctggatctgggctaggtgacccctggggcctcagacctctgagtgggccccagagcccagctgaggaagccacacagcctccaggacgtggcacggttcccctccacttggctgcaagtcgcctgccatggggcgaggaggcctgcaccccagtataagggcctccccagctgagtaagaagctgcttcccctcctctcataggccaagcctattgtgtgaaaccrtctcatggtcttggtgacgtagaccatttttgaaaccgtctcatggtcttggtgacgtagaccgtttgcttctttaactccagccgcggaatgacattagtggaaccgggctrgggaactgctggaagttcaggatgccaccaccttgaacacctaggccagggatccccaccatgtcccgggtttctttcttcgagagtatagaaccgttcattcttgcttygtgtcccattccatctcttgaaaaaatgtagtctttgaatgtgtgaaaatctagggacattcaatctagtcttttaaattatttttccatatttatatttttaaataaatgcatatattgagtcttaaaatctctttctggccaaagactgaaacctggaagcaacaatatacatgcatatcccgttctcacaatgtccttgtttgaaaggctgtaaaatccacaggcaaaaagtttggtctcaaccctcaacagctgactatgatcttgtccggttcatctctgctatctttaaaatcctacattcggctgggtgcggtggctcactcctataatcccagcactttgggaggctgaggcagatggatcatctgagtggtgggcaaatcacaaggtcaggagttcgagaccagcctggccaacatggtgcgaccacccctgcatctctactaaaattacaaaaattagccgggtgtggtggcgggcgcctgtaatcccagctactggggaggctgaggcaggagaatcacttgaacccaggaggcaaaggttgcagtgagccgagattgcgccactgcactccagcctgggcagcagagcaagactccatctcaaaataaataaatacataaaatcctgcattcctagttcactgcccaagagatcagcgttagatggaaaagagtcttttgaggaagacacaaatacttgagacctgatgaaccacgctggttatcaacaattcagtgaataatatagaaaacttttattagcagcatcttaaaaagtagggaaacaaacacccagtctcttgataaaaatgagtctcttgggccaggcgtggtggctcatgcttgtaatcccagcactttcggaggcccaggtgggcagatcacaaggtcaggagttcaagaccagcctggccaaatggtgagaccacgccccgccccccatctctactaaaaatacaaaaattagccgggtgtctgttgtcccagctacttgggaggctgaggcaggagaattgcttgaacctgggaggcggaggttgtagtgagccaagatccaagatcgtgccactgcatcccagcctgggcgacagagcgagactccttaaaaaaaaaaaaaaaaaaaaagtcgtcgatagaaattccattaatgagagggcacagccaatctcatctaatttcagtcaactagtctgatgtcctgtatgtataacattttgggctgggtgtggcgtgtgtaacattttgggctgggtgtaattctagcactttgagaggctgaggagggcagattgcctgagctcaggagttcgagaccagcctgggtaacacagtgaaaccctgtctgtactaaaatacaaacaattagccgggtgtggtggtgtgcgcctgtagtcccagccactcaggaggctgaggtaggagaattgcttgaacccgggaggtggaggttgtagagagccaagattgcacaattgcactccagcctgggcaagagtgagactcgtctccaaaaaaaaaaagactttgcctgaacaaatgtgccctaagtttcaaattaattcattgaaaatctgtaccaagatgtttatggtaatggggcttcaaatgagtccgcttttatggcttcttcctaggcctcttctccgacccaaacaattgttaaagagattctggtccgaccctggagtgtgttcacgtggcttgacagtaagaggctccaagtcttccggcggcggcggtggggagggcaggatatgacgtgtctagtaagatcatggatcgaaagtcaggtgattcccttggcactcaccgctagatcttagattaatggaatttcactcagaaaggagtttaaatgaatgcaaatgatgttggccaatctctggaaaataaaagaattgttaaatacggccaggcacagtggctcacatctataatcccagcactttgggaagctgaggcaggaggactgcttgaagccaggagttcgagaccagcctgggcaacctagtgagaccacacctctaaaacagcaatgagcacgcctatagtcccagctattcaggaggctgaggtgggaggatccgctgagccccagtggttaaggctaccgtgagctgtgcttgcatcactgtactccagggctagcctgggcgacagagccagacctcatctcaaaaaaaaaaaaaaaaaagctggctcgatagtagtgggttcttagaacctaatattagtgtcaactttggtatcctatcctccagtgctaaatttggcaaaagaaaaaaaaaacgtggccaggtgcggtggctcacgcctgtaatcccagcactttgggaggcccaggtgggtggatcacctgaggcctaggcggctggtcaggagttcaccaccagcctgatcaaaatggtgaaaccccgtctctactaacaatacaaaaaattagccaggtgtggtggcgggtgtctgtaatcccagctacttgggaggctgaagcaagagaatctgttgaacccaggaggcggacgttgcagtgagccgaggtcgtgccattgcactccagcctgggcaacaagaatgaaactccatctcaaaaaaataaagaaaagaatctgtgaaatacgactgtgtgagggtggtttcaaaaatacagctctcggggccaggcacagtggctcacgcctgtaatcccagcactttgggaggccgaggcaggcggatcatctgaagttgggagttggagaccatcctggctaacatggtgaaaccttgtctctactaaaaatacaaaaattagccgggcgtggtggcagttgcctagaatcccagctatttgggaggctgaggcaggagaatggtgtgaacccggagatggagcttgcagtgagccgagactgcaccactgcactccagcctgcacgacagagcaagaccccatctcaaaaaaaaaaaaaaaaaaattcagctctcattctctcaagcatgctttgcttgtcttttgttcagcaagtactttcctagctctgctccaggccagacggtctagccaccagcagggacactggaatgagccaaatagcctgcttgggggaggtgaccatcttaaaaaggcagccgactataaacaaattcaagtgcaccttagttccaaagaagtgaagtggggctgggcgcagtgactcatgcctgtcatcccagcactttgggaggccaaggcgggtgcatcacctgaggtcaggagtttgagaccagcctgaccaacatggtgaaaccccgtctttactaagaatacaaaatgagctggcgtggtggcccatgcctgtaatcccagctactcaggaggccgaggcaggagactcgcttgaacccaggaggcagaggttgcggtgagccgagatcgcgccattgcactccagcctgggcaacaagagcgaaactccatctcaaaaaaagaaagggaaaaaaaaaaagcgaagtggggaggagtgtggcagggagggcgggtgtgcgacctttggttagagaggaggcagcgagggagagccagctatgtggcagggaatggagagaacctttgttggcctcggcttccaaaccacagacaccgagggctaattggtagcagtttctagaatgtcctcgggctactcggtaggtggagcaggactgtgcttcaccggaatcttcagaagctcaaccccaggcctgacgcgtgtggcgcyggagctctgcgttcactgtgcagctgaacatcaggggctgcgtgctgccgggagcttctgtcccaggtgtggttaacactaggatgtttctaacaggaagtccactgttagaacagacaccatcgtcctccggctccggccctccaatcccaccaggtgggcagcaagctgacgcttcccacatgggcaaattcaagcagtcaccgtcgctggagtgtgtgtgttgtaaaggcaccaggtcttacagaaactacaacagccagaggacagtaagaggctaagaggagtaaagcttacaagtttaatttcctgaaaatatccactccctctcccatcggtcctgcaaagaggctgcacctctcagctactcaaaagacaggaccagagacgttctctcctcctgacaaaactgtgccacacagctctgtgcagcccacggagtcacacatgtaggaagctacccttggactacaggcagcaccgcaggtggcccatgcaggttcccaggcccgacctccccacaccccttggagctcccgaggtttctatgggtgtttgagaaccacgttacaagttttaacttgtacacgttttttgcttgtttttgtttctttttttgagacggagtttcactcttgttgcccaggctggagtgcagtggcgcgatcttggctcacggcaacctccgcctcccgggttcaagcgattctcctgcctcagcctcccaagtagctgggattacaggcatgcgccaccacgctcagctcattttgtattttcgatagagacggggtttctccatgttggtccggctggtctcaaactcccgacctcaggtgatccgcccgcctcggcctcccagcgtgctgggattagaggcgtgagccaccgcgcccggcctcttgtacaagtttttacaccacatgaaaggctaccccgtagccgctattccctaagccatgcggcctttcggatctctggaaacacccacatctgcggccgttcctcggcttggcggtgctccccacctctaaggcacctgcaggcttcgctgccggtcaccattaccccccgtcaccccaccccatgcatgctgcgacacccctgacatcagcacgtcgcacgagaacaggcttcaagacacggggtcaaaccggacgactgacagggaggaaggcctccatgttagaaaagctgccaattcagacagcccttaagaaccgcccctccccaggcgagaaggaaaacaccgtgctaagaaagatgccagctctttattaccagggaagctgtgtgcacgcgcgtggagcgcgctccttggagctgaccgggcccttaccttctcctgcttgtcagaggtgagtcctggtacccagcacggtggcctccgggaggctttgataggtcagcctttgctgcctcccagctcagggctcctccaaggaacctgcggggccccatgtgcccacagcccgaggagggaagcaccgaccgccctcctcgtggcacgctgcactccagcgctgggcacttcacctgcttcctggcttgcggtggtcaggctcgatactgactccactgatcggcacattgagttccgaaagaatgcaaaccgcgtgggtgctgtggcgacattgtttgcaccgtttatacaaccagacagctttttagactaaattcgtgtccaaactaacacgcacgggaacgggctccagctgcagctccctgggtctgtcaggccggggagcggttctaccggaagagccggtacgtcctgggcaggcgcccgtccttactcgacagggcggtctggatgtgctcatacgtgggcaggtcagtcaggtcacccagggcggccactgccggcttccctcggagcatcttagaagcgactctcttcacatcttccggcttcacgttgcctagtgcagagggcaaacgcgtgtcacacgagcgcgccacggcccccacgctgaggctgcatcagtaaacacacggagggggcggctggtctgtaccactcactcacgctgtgctgctgatgggggcacctgggcccaaaggcagccactgggtgtagccaagggtgagtccacaagtgacagacgttgagttctcagtaaatggggacatggcaatgacttaaaaatataggacaaagccacccaagaagagttacacttacagaagagcgagctccgtgtctgatgaactcactttaggacggcctgcagaaaaaacccccagcccccgagggccgcatggacagaagggtggggtgagagaaggccaaagggctgcacccaggaaccccaggacaggagtgatagggtccaggtgggtctgttttctacagaaaacgaggcccgagagaggctggacactcgcttgaggattta

SEQ ID NO: 94204 - DNA, 83645 bp, Homo sapiens
  misc_feature (1)...(83645): n = A,T,C or G
ataatgatttcaatggaaatgtggtctatatgacaagagagaagcgagattatacttgaatttgatgattggcatttcacactctgttcagaattttagcctttatgaaggaccctgtctaccttcttcaaatgcctcaattgaaagggtatggcaggaaaagggatggagagggggtcagagataatcctcactgatttcacaatttcccctagggcccacctgtttgaataaatacctagtggtgatgtagcaagaaaacacccctgaatcaatatttttagacaaactaccattaccattaccatctgttaattagaaagtaactctcagatcgcttgaacccaggaggcagaggttgccatgagccgaggttgtgccactgcattccagcctgggtgacagagcgagactctgtctcaaacaaacaaacaaacaaaaaacataaaaaataaaaaataaagtaattctcagattctctgtaaatcaggagctcttttggtgatacacacacacacacacacacacacacacacacacacacgtggagagaaaaaaaggagccagctaatgggtgatttcctttactataataattctaatttatttcttattgccagtttccacacaggtccaagccgcaaaacaataccgtctcacaacagagcagagctttacagcttataaaacattctgggaatattagaatattaacacatgaagatttttgggtccttcagcacattagatatgacctgggacatagaggactcttaagaaaagagaaattgggcatccacatgtggaaaaaaaaactcaatctcaacctcaagccttagacaaaactcacagtggatcacagatctgaatggaaaatgtaaggctacaacactttcagaagacatagggagagaatctttgttaccctgggttatgcaaagagttcaacagcatgatccagagaaaggaaacaaatggtaaattgaacttgatcaaaatttaaaaattttgctttgtgaaaaacatagtcaggagactgaaaagacaagcaacagactgggaaaacacatttgcaagttacatatccaataaaagtgttgtatccagaatatatatgtagaacattcaaaactaaacattaagaaaataaacaattcaagtaaaaaaaaaaaaagaagaagaataggggtcaggcaagctcagtggctcacgcttgtaatcccagtgctttgggagtctaaggctggaggactgttcaagaccaggaatgtgagacaagcctgggcaacatagtgagactctatacctaccaaaaaatttagtttggtgtggtggcacacacctatactcctagctatttgggaggctgaggttggaggatcgcttgagcccaggaggtcaaggttacagtgatctatgatcacactattgtgaaaccgcctttgcaaaattatgacagacagtgaaagaaatctaacttgaccgaatccatcttgcttctaaccttcaagctgtccttgttcattcctgggcataggctgaactaattttgggagaaacttagtttatagtttatggtttaaacaaagacggtaacacccctttcccaaagtgacctccttcctgcctggggactagacttcctttgtaggactaacattagccacaagatcagatgagccagtttattgatctggtggtgccagctgatccatcaagtgcagtactgataccccaagcactgattttaggagcagtttagggagggtcagaattttgtagcctccagctgcataactcctaaaccatattttttttttttttgaggcgaagtctttttctgtcactcaggctggagtgcagtggtgagaactcagctcactgcaacctccgcctcctgggttccagtgattctcctgcctcagcctcccgagtagctgggattacaggtatgtgccacaacacctggctaatttttgtatccttagtagagacagagtttcaccatgttggccaggctggtctcgaactcctgaccttaagtgatcttcccaccttggcctcccaaagtgctgggattacaggcatgagccaccgtgcccgaccctaaaccgtaatttctactacaaaggcaatctagtccccaagcaggaaggaggtctgctttgggaaagggccattatcgtctttgtttaaaccataaactgtgaactaagtttctcccaaagttagttcagcctctgcccaggaatgaacaaagacagcttggaggttagaagcaagatggactcggttaagttagatctctttcactgtctcagtcataattttgcaaaggtggtttcaattgcattctagcatgggtgacatagtaagactctatcttcaaaagaaaaaaaaggtaggtaaaatatttaacagatattttaccaagaaagataaatggatggcaaataaggacacaaaaagatgctcagcatcattagcctttagggaaatgcaaattaaaaccacaatttgtactacataactgttggggtgacaatgaaaaatatttgcaataccaaatgctggaaaggttgtggaacaaaaggacctctcatgcattactgctgagattgcaaaatggtatattaactctgcaaaaccgcgtgacagtttcttcaacagttaaacataacatataactaccagatatacagctattctactcctagatagttaccctagataaataaaacttatgttgacacaaaaacctatatgcaaatgtttgtagtagctctatttacaaactcctcaagcgggaaacaactcaattgtcctttaatgggggaatggataaataaactgtgatataacgatacaatggaatactactcaacaataaaatggaacatattagtgatacacacaacatgggtaaatctcaaagacattatgctaaggagcaagtccaaaaatactacacagtgtatggttccaattatgtcacattctggaagaggcaaaactataagggagagaggagaagatcaatataccagggattagaaaagaagaggatgtgattacaaaggaatttaaaagggagttttctggagtgatacaaccattgcgtattctgattgtggtggtggttatacaaatctacacatgtgttacaactcatagcactgtaggctaaaaaatgttaagtttattacatactgatgtaagcattttttaaataataaaacatatcaagtacattcatttaacaaaagaaaaattgtaagagagtattgatttccatttgcagataaggaaactgacttccccaaggttattcaaccaataaataggttctgaactagaatccacttctagaatattatttttttcctgttgttatataagaaacaaaccttcaaacacctaagccaaattgtgtattagttagcatgcatttgattgcaagtaatgaaaaccccaatccagagggattgttcttctatgaggacatttgctatttcacataatgaagtggcaagtggtagggagactcatgaggctggttgattttgcaactcagtgatgtcctaaatgactaagattccttccttcttccactcagccaaccacagcttccttataaggctacttcctctcattgtcacagggtggctactggtctcagacaaagatacaagctgctttgtccatatccagtggaaaatagctcaccagcaacagtcccacagaactcggaagacttaactagtgtgtactgcatgcaaatgctgcggcttcttaggatcttaaagattctaggcaaccagctataaaaattatttatgtaactagtaacactctgaaacaaatcagagcttcgcactgcagtaatcgccatctgtcttgtttgtatggatctcaaatttgcagtatttttttgataatagctatctatgcccgggctcttagacactatacctcatgtttgattagcatgttaaaatttccacagcaccataataactcattttatttagttggacaggtgaggactctgagggtaccgaatgacttagccaaattcaccaggagtgagtgactgagccagaggtcacatttgatcttcaaacatcattctcatcattctttcctttatatcacattgattccctcttcaatgcttggatttcactagggaagcacactggcaatttcaaagaaatatttcaagtttatacagatacttaaaagctcaaaatgtcagagaactaacattctttatatccccaatagcaacatttggctatttggaattttattctcagtaataggataaatgtgaaatcctagcatctcattaacttcttcgtctcccttctttcaacatccaatcaattttcatgataggcgaattctaatttctaaatcgctcttgcatccatctcctgttttctatttccacagccctaatatgtattcaggcctcatatttgtcacacaataacctctttgtctctttgcctctattttcttcacattgtacttctcacacaatggccccaggttaatggtttcaaaacccaatgcaaataatgacatatgtcttcttgtctgccccagctccaaaactttaataatcttcctttgactaccgattaaattctcaactctataatctggctttcaaggccctcagcaatctggcttcaatatttctttccaaaccttgagaaaatcctcctttctgggtgggagtagtagacagtggtatactggagccagctcacagtagcttgcaggaactttttttttctttttttttttttttttgagatggagtcttgctcagtcgctcaggatggagtgcagtggcgcgatctcggctcactgcaagctccgcctcccgggttcacgccattctcctgcctcagcctcccaagtagctgggactacaggcacccgccaccacacccagctaatttttttgtatttttagtagagatggggtttcaccatgttagccaggatggtctcgatctcctaagaactatttttatacctctcttcatctctgtgttcagtgatgtcacattagtagcttgaaattggctgtgatgggaatatttacaccttacaagtcagactgctacaattcagagcttttgttttgaagagctagttattaaacatttaccagcataccactatttacagaataactgggactaaacttgagagtgagggtgcaatatggtattggggaccaagttgttgacacagaaagctcaggtaccaactcaaagataggagggccagggggaaaagaagaagaagctgtgttgcaaaactgttgagaaggtagatctgggcaaaagttgagtttccatagaagcagacatcgagaaaggggtttgggttcaagtagttgatttgggaggtagtcccaggaagcactggcagggtagtgagggaaatgagacagggaagggaaggtggctaatacagggtagattgatgagcaggttattactgtgggcaattgaggttcaattccactggggaccttttggggagcatgtagaatgtgcttcatagttgccactgctatggtttgaatgtcaactgaaaagcttatgttgaaatttaagtggcattgtgatggtagtaagaggtgggactgttaagagatgtttagaacatgaaggctctgtcctcatgaatagattaatgtggttatcacaggagtgggtttgttatcaagagaataggttgttataaaagcaagttcaatcctctctgtctctcactctcaccctctcttgccctttaccttctgccatggaatggcaacgcacaaaggtcctctgcagatgccggaaccattctgttggacttcccagctccagaactgtaagccaaatcaacttttctttataaattacccagtctgtggtattctgttacagcaacacaaaatggacaaagccacccacacaaagagtgaggaatatgagaagtttatcctcaagaagacagcagtgggtatttkcrttaagaagtggcaggtatgtaggggaagaccgaatgccaaggggatataaacaagacacagayactcgtagttttttgtttycatagcgtgcttggtggtggtggggcttcatttcaatggccaatgatggaatgtatttttccagttatatatcatttgtttttaccctacacactctatttgttccttcctttaggtctactcacaggttcttttttttgctacaatatcctttgtagctccctccagttttgactattttctgattcttgcaattcatcaaaaatcagtgccacctttttcaggaaccccatctaatccccaccccctgatgatagaagttagaagagggtyacgtcaagctggaggtctcctgtggcttgaagcaagggagcaggtaacaagcccctccacctggttaagatgtttggggtcagagagcagagacagaaattgtattctggagtcattccaaatggtgaatattggaaggaactcatcattcctgttttatcactctgtctctcagaacccacacagcacagaggattggcttatgatggctgcacaattgttgatggtggcagagaaaaatggatgaatgaaaggctaggtgaacaaagagaactagataggtagtgaaacaagaaagttaaaattgaattagaggaatcatggggtcaacaagagcccctggatgaattctgaggatgaacatcaaagcctgtaaagtaaaacagactccacatgtgacataatcagcagaagctgggtagttgaaatctacccctcaacaagttcattgagatgccctgccttttgagattcagtgaaattgcttttaacttcatcccacttgtgatgcagctccccttttccaatccctctgggagttattggtatcttaacttttttttagttccctctggctttgagctcctgcatctgtagcattaggagggtttgtgagttgctttggcatctcagaaatgctgcctgtactctctagcatggaactgcagacacttcttgatttctccccaagcattaccaatatgagttgtgtgtatggctagcacagttcagtgaagatatggggtcaagctatgggctttatattagcctgtggtttggcctcatctccctcaggctccatgcaaacgttcaatttcactcctgtattatgtggagcgcttttgctctctgaaacctattcaataactggccttgtttgcctcttcaaagatgctttattatgttttttaaattcactctctcccttctcacctctgtacctttgcaagcagttgcttctgcctggaatatcctttccagaatggaagatttggtagaggttgggaaatgtcagtctttcccctcactttatctcacatcattctctgtaagtagaaggaaatggtgacaatatttatttctctactagtattaattatgacatcacaaacatctcggctcctgaggtggccatagttggtctttaaataacactttttggtattccacaaacttctggaaaatatttacttgggtttgctaaagtcatataaattgaccagaagaggcagccctacccctgcccctcctctccttcctcctacccttcctaccttagagggctcccgcttcttcgaagccagacaactttgtctggacctctcctatgggcttgtattatggatatttgtttataaatcataccacctttactgaactgtgaactctgcaaagatgatgtcatcttccctctctgaaacttcagtgcaactcggtatctgatacagaattgactttgaatcacctgatttctaactgaggataaatgaataaatgtgaagttgcagatggccccttagtgatctgaataggctgctaggggaagagcatatggtatccccacttcccacttgtactgactgtcrggtgctgttagaatcaataggcaactatttcttttctttttctttctttctttcttttttttgagacagtgtctctctctgtcacccaggctggagtacagtggtgcaatctgggctcactgcaacctctgtctcccgggttcaagcaactctcatgcctcagcctcccaaatagctgggattacaggtgtgcaccaccacgtctagctaatttttgtatttttagtggagacggggattcatcatgttggccaggctggtctcgaactcctgggctcaagtgatccgcccgcctcagcctcccaaagtgctgggattacaggcgtgagccaccgtgcccggccagcaattatttctttattgaagacttatgtgcaaggcacaaagggagctccaggactgagatatttttactataccttctctatcatcttgcacccccaaaatagcttccagggcacttctatttgtttttgtggaaagactggcaattagaggtagaaaagtgaaataaatggaaatagtactactcagggctgtcacatctacatctgtgtttttgcagtgccaatttgcattttctgagtgagttacttctactcaccttcacarcagccagtaccgcagtgccttgcatatattatatcctcaatgagtacttgtcaattgattttgtacatgcgtgtgacagtataaatatattatgaaaaatgaggaggccaggcaataaaagagtcaggatttcttccaaaaaaaatacacagcggtggagcttggcataaagttcaaatgctcctacaccctgccctgcagtatctctaaccaggggactttgataaggaagctgaagggtgatattacctttgctccctcactgcaactgaacacatttcttagtttttaggtggcccccgctggctaacttgctgtggagttttcaagggcatagaatcgtcctttacacaattaaaagaagatrctgtttaatctgaggatcctgttaaacaatgcagcttttagaaatggtcacaacttcatggttcgaaattttcggtaagtgatggtcagagacttgggtttgatttaggaatcatggtgatgcataaaactatattctgcagtaaggcctctttctgcagaatgtagtgccacgctctgctttactcttatttgagacagctgcctctaattccagcaaagctttcatttctcagtccttctgtaatcagatttcaccgtgtgctgtaggggaagccacccatggcaggtataacagactaaacgttcttgacatctttcgtttgtgtacattctaaacgagcaagtggctgaaggaaattaggggaagtaatttacacagggccttcagcttatatttgggcttgctataaaacaatatatcactctaagatgttgagactaatcagttcttttgaaaaaacagactccaagtagcaactaataaatactgacaaagctgctgcaaagamgccttatatgtgatggggataacgacatttttaaataaaatacaagtttgaaaaccatccctgaaattcttgctggcatgtgcaaagcaggctgtctccaatgaattcattataaaagtttacatcctgcttacaaccattgtgcatgtggttgaagatggcatggagtgtgtctgtggggaagggaaaggggaagggaacaggggagatgagttagctgggtaaacaaggccatcaggtggagacatcactaccagaaagcttctagaacagtttcatgttaataatgagacagaatttcttcagagcctctttataacctaaagcaaccttcccgacttccttaaggaagaagcttttggtctgaagttttcttttattattagtaagtggacctgtgatagtggccctgggcatcccttctctggagcagctgacagttctaggttctctggactccaccattagcactacttctttagtgaatataaggctctcagaagtcagaatgataccgtaaataatattgtaaattaagcccataatattagacctagttgagacctcagagccatgaaataatgccttctcttattttattttgggaggaaatgtgatttttatttcttaaacagctcaaatattcaattgaaattgtttcacttctcttatttcaagtataaggtaaaaaaagcccagaatgactgtggggtttaccaattagtgccagagttagatcagataacaacctggagaaaagtttaaagaactaggttcaaggcctagcaccacccttgctggctatatgaccttgaacaagtcactaaacttttctgcaatgttgtttcacctataaaatggaaaaaaggataatacctgttctgcctacattacagggtggttcaatcattccttcaacaaatattaattgaacatctactttgtgccatgccctatcaaggagttggagatacggtggtaaataacgtaaaaatatacttcactccagctacatgaattcatagtctagtgataatcagtgagataatgtatatgaaacctaaaaagtgacagaccaatgttcattatttattttagtattccattacactgagttacatcagataaaaatgtgatgaaattttattctatagcttttaacaaggaatcatcactgagttgaaaacacccaactgaatgaataatcaaagcctggaacttaaacttatactgttctttgaaaactacaatgataattgatttttaaaataattattacggattaaattttgcaagtaaaacctcctccaaacagttgaactttttttttttgtatttactaatacactactgtctatatccagtagccagactacatttctgaaaatcctggtgagctatttctcacagtgaatgggggctggcacaaaagtatggctaaatcggcccaaatccaaactttctatttgaaagtgtgaaagcctcgagtcacccatgttgttagaaactcaatagtgtgaatctctattgaaaaatgagataatgttgaaatggtttcgacatgcattctcacgtggcataggtatttttctttcctactgtattggttagttgcactacctgtcagctagataaattcagaatttctggtctccaataagacttacaacctttgacaaagccctcaacaacagagaaaaactccctgtcaactctgcctgttctatatttttgctttgattttcagcctttcacagggattcgagttatttttttctcccacatctcttgggaaaggtggagggcccttgttatgtaacataccacgtgagtttactactccagaataataggaaatatgtggttagaatttgatggtgccacaaaataggaatcgcagttttgaagtgagcggtcatatcgccatgggcatgataaaataatagcttaagtgaggctgaagccatccacacagcccctggatcaatcacttttagtcagttaaatttttttttaacaagatcgataggatcagaaaccaagactgctgaaaacacccaattcacaggctttccatgtcataaacaaggctctaaagccttgctgtgtttggataatagagaatatcctatgatttgttgcctattagggaaaccacttaaagctttttaagaaaccactaaaaaaaaaatctctttctttatcagaaaagaccaatttgtaagtgcagttcaatttcatctcacaaatagaaatttcttcagagaatattgagctaagctactcaattctgtggaggttatggattggagccagaggtgactagttttcaggtgtttcattccagacctctgtaagggctcacataactcattatgctcccttcgtctctcacacatgcccatccatacacacgtggacatccagacaacgtgattataagacgttcatgttcttgcatagaggagagaaaccagtgcactttgattattcacaatgtcgaaacttaaaatgaatgccttttaaaaacatcacttcagctgggtgcagtggctcatgcttgtaatccctgcactttgggaggccgaggtgggtggatcacctgaggtcrggagttccagaccagtttggccagcatggcaaaaccctgtccctgttaaaaatacaaaaaaagaaaaagaattagctgggcctggtggcatgcacctgtagtcccagctactcaggaggctgaggcagaagaattgcttgaacctgggaggcggaggttgcagtgagccgagatcgcgccaatgcactccagccacctgggtgacagagcgagactctgtctcaaaaaaaaaaaaaaaaaaaaaatcacttcacttcagaaaaccatacaagagatgggaccaaaagttgaatggggtcatgatgttttccttggccaacagtggaatttgtttcctagtttatttttagtaattgagtaacgtaacttagataaaataagccactgatttttgacagtttcaggtttccagatctttaatagtaggtctgcagaaagctagccttcatctgaattcttcaattttcagatgagaagtttcacaattttagaatattaatgatctaaggtatcttagaaactactagtcactcagtgctcaataataatgttgtagaaaaaactgagttcttttcacatgaccaggaaagtttaggctcacagacactttgaagggtgagggggagcggaatttattgagtgaaaaggaaaaaaactcagcaaagccagaggggttcctgttaacaggcccccatctcacagactgaatgccaggttaccacacaggaacaggagaggcctagctcctccccactccaaaaggtgcagtgcgaacttccccaaggccccaccctgtcctcccagtgtgcaggtgggcattattcagaaagaatcagtcgggggagtgtggggaaagggcgggcctcatccgggacaggcagtcctgttcatcagcctacaggctgttttaggcttgaacgtggggtttcgctgggggtcgcgggtttgggggcccttggctgccccttgtctctatcaataatttatatcacatatgggtatgtggcaacagtgaggagggtttcaagtaaacttttattaatacattattattgttattgttaataagcataaatttggaaaacatttgtgagtttttttcacatcagtgggatcactgcaaagtttttttttgtgaaaatacagctcctttcttttgcatgcattctaatatgcctttttgagaaggaaagaaagggatagaattaaagttaggccactgaaaattcatgtggctccagtttacaaacttcatgagtgtgggggaagacatagacaaagagaatcgctaatttcgttcactttattaaattttcaggtgaagaattgaggctcgagatggcaaataaccttcccaaggccattgtttattcttaaatctgggctgaactaggactacaattcaaatatttaaaggcactgctcttctcatttcattgcttgtattactttgatcccttccaattgatcaagctggccaatctacctttgcctaatatccttttttaggtacagccagaatatctcagtaaagaaaaaaaacatacacaagaaaatatgccttagctcttgcattaatgcaaggttaaagaaacataaaaatctcagccataaggcccattggccccctcttatgtctccagaagttaaagtctttatctcaaattgtccatggggatcagagtatcatttaacactgaattttttcctactctggcaaaatcagtttctgactgaccacattttactcaaatcaagcactttctcttccaataaaatacaattataccaggaatacatccaagtctctcccaccccccagtttaccagagttggaaaatgcagacactagcaatgaaaggcttcattctgcaagtagcaaatactcttccattttgtagctaggaagatatttgggtaaagttaatacaaggatctcttattaccttggcttagcttcttagcattcagtgatttggggttaagaaatctctgtaattattttttcaaggaataaaatgaatataaggaactagacttgcctttttcaagggctctggctctgaccagactgcagtgacagttttgatggartatttgtacgtgcttctcattgtttcccacaacattgtatcctccctcttatgtgcagcctgaataataataatgtggtttgtgtctggtgtaccaaggagatttcttgtttactctgatttacttcttgtacactttggtacaagaaaagcaagcattttacaggagactcgaataatgcatttggccctggttctggtgcttgtgaaccagagcaggctgcctcctattgaagaatgaggtctctagggggaacttaatagccattgatgccagcagtcttacctggctaattcaagcgtggctttatcacccaaaagcaagaaaatgcttgctacagaccagaaaaaaaaaaaggaggcctgtgtcagaactgttttaatgtggtacaattgtggaactcttctaatttttatgtagcttaggaaagaggtgtggcaactccattttggagccaaggggaggtctgtgaggagacagtaaacaggataggaatttaaactgggaccattgtatttgctttccttccagtgataaatttccctggttagttctcgatatctatgaaaaacagctctttttcccaagctaacatttcctgccccacctcctggatggaattgagaaaggtggtgactactctaatgatttttcagtggtataaacagcataaccccccctcactagctgtggtggaatttttttttttttttttttgagatgaagtcttgctctgtcacccaggctggagtgcaacggcgcgatctcagctcaccacaacctctgcttccagagttcaagtgattctcctgcctcagcctcccgagtagctgggattacagacgtctgccaccatgcccagctaatttttgcatttttagtagagatgaggtttcaccatgttggtcaggctggtctcaaactcctgacctcaggtgatccagctgcctcagcctcccaaaatgctgggattacaagcatgagccaccgcacccggccagctgtggtgcaattttaaaagaaattctagttaatcactcaagccctcagatgctggtatgaccagatatatagcatctacctctctaccgcttttgtccccaagaaccctgacaacttattctgtccaaaaggagtttgtggcaagaaagaaccaaagtatcagtgtagtccactattactgtacttccatttcagccttcatggtggtatgagcaaacattggccctataaggtatacttgccagttttccaggttttggcccttgactcatagtgctgtgcttaggatccaagattagtccactcttgtttcacatacatatgtccagtcattgttcccagtagtgcaaatactataccagagtggtggggttctaggggatttcagctttagcaacacactaggccacagtcaattatcctccatgattttcaggccttgtgttcagcctgggccataccctatatttgctcttccctcaacataaattttgtcttttttttttttttctgagatggagtttccctcttgttgcccaggctggagtgcaatggcaccatcttggctcactgcaacctctgcctcccaggttcaagtgattctcctgcctcagcctcccgaatagctgggattacaggccctcaccaccatgcccagctaattttttgtatttttagtagagacggggtttcatcatattggtcaggctggtctcgaactcctgacgtcaggtgatctgcccgcctcagcctcccaaagtgctgggattacaggcatgagccaccgcacccggctgaagtgatgttttttaaaaggcattcattttaagttttgacattgtgaataatcaaagtgcactgttttctctcctccgtgcctggcctatgtcttttcttatcatcagaacttggtcaggatgttgaaaatccatcatgacaaatctttcaatattcatcccagaaatctgctgggaattaattctttctttcttttttttttttttgtttttgaggcagagtttcgctcttgtcacccaggctagagtgcaatggtgcgatctcagcttactgcaacctctgcctcccgggtttcagcgattctcctgccccagcctcccaaggagtagctgggattacaggtgcctgccaccacgcccggctaatttttatatttttagtagagacggggtttcaccatgttggccaggctggtctagaactcctgacctcaagtgatccgcccgcctcgtcctcccaaagtgctgggattacaggtgtgagccactatgccgtgcctgaattctttcttatacaaattgatttacttttgccctaatgacctactatcatttattcatttacttaagaaatatttattgaatgactactacattccaagcactgtactaagcaccgggtatatattagtgaataaaataggaaaggtccctgctatttgtggatcatatgtaatccagtgagaagagtaaaagtagcaataaataaacacataaatatatattaaaattgtgataattattacaaacaaaatgaaggtaaagtgaagactacttagacagtagagtcaggaaaggaatctcttaggaagtgatatttaagcttacagcctgagaatgagaaggagccagctttgagagttgaggggagagtgttctggacaaagggaatggtatatccgagtcctgtgatgggaaagcttttggagtacaggcagcccctcctttgcgatatcccaatgtgcacaaatttcaattaccacagtttagttaataacactaggccactacgaacacagttcaaatttcagtcaacatggcatattaattatgagtaattcataaagcaaaacttcattgctaactcttcagtctacaaatcaccatgtaaataacacatacacagtacctcatggtcagtgaccaattacatcacttctttcaaagtctgttggtgattggtcactgtgcatctgtcattcagtttgcatacagacagcaaagagtatatagctgtgctgcctccttttctcccagtgataaacccatgggcattttacaaaaatggataatgacagtgcagtacatgaaagtgcagcagagaaataaaaagtgcctttgggaggctgaggcgggtggatcacctgaggtcaggagttcaagaccagcctggtcaacatggtgaaactccatttctactaaaaaacacaaaaattagccaggcgtggtggcagacgcttgtaatcccagctactcaggaggcttaggcaggagaatcgcttgaacctgggagacagatgttgcagtgagctgagattgcgccgctgcgctccagcctgggcgacagagcgagactccgttaaaaaaaaaaaatactgatagcagtggaagttaaatttggattgaatgtaaatcgagttatggaagaaacagctgactatgtgattgttaccctgctgctgtttgagaggctgtagatatacagccagaggaacttagtgaagacaaagttattgacataactgcagaaagtggttgtgacaaaaaggatgaagatgtcccaggggaagtaacaccagcaaaacacttcacattaaaggaactctcacagatattacacagcgttcaaagtgcaaaggaaaatgttgaaagtttatccaaacttagaaagaattatgacagtttaccaaaacatagaaaagatgcttgctctatatcataggttctaagatgagaaagcaagcactgttcaaattactcttgatagagtttttacaaggaaataaagcactataattctcaatgcttctaatgttttaaattacattgtactaaaaaatacatcagttttactatttttcacttccctacacatttacaactgacaataaaagtttttaatgttctgacaattttttaaaagtcacagaacgattacaattttcccactaaatattaaggttactttacatggcttcagatttaatggctattcacagtcccacacactaccatgcaaattaaaaactgcctgtgtttaaaaaaaaaacagttttggaggacattatgctaagtgacataagccatgaaggacaaatactatatgatttcacttatataagaatcaaaaatagccaaactcatagattctaatttaaaacatcagacaatactggttgtcagaagttgggagtgggggaaaaggggagtttttctatggatctaaactttcgattattctagatgaataaattctagagatctgctgtgcaacatagtgcctatagttaacaatatggtgtcgtgcagttcaaaatttgttaggagactagatctcatgttaagtgatcttactgcaaaaccaaacagcaaacaaaaacacaaaggggcacaaggaaactctggggtgggggaaggttatctgctaacatttattggagatgtgattcaagggcagcaagagtgagggcagcattatcagctgctgccatggaaagtctagagtcagaaagggagatttttccaatcacttgtagtccaagggaaaaatattgaaataaagtttctgttctatatacatttgaaaatcaaaggccttgacaaaaaggaaagcttcaagcaggatgtttgtgtgttctttctacctttatattcaaatcttctgtcagtggagaaatagaaacagcagcatctcacaatgcaaacccacagcagaacattaaccctaaccctaactacaagcttaatttcacttccaacttagaaacttctaagtatgtaggacaaaagctgaggaagccccagaaacttgttactttctccagtctgtcttctattggggataataagaactggaagctggagcttttggagtagtaaaaggtaaggtattgttggtcctcctctttcctgtttccttttatggaaattggggagaaaaaatttagtcctttgcaaaattttcatttccacttctatttctctgagattcaacaagaacaacacaattctaagatctatgacattctcttaaataaagcctgtagccttgtgagcattcagaagtaagaggatacaacaaaatcccgcagaggctgagaataggggatgatattgaatcctttaagtatagcagtttggagactcagcttttgtgggctccaaaataaccaggagtctgagcttgaactcaagacaaaaaattgagggcctcaaaattagttcatgagtggtttttcctgtggttgatggatgtgagttcaacagctatagtgatgtttctcaaattccttgaaacagagggagtggggttttccagcaaagtattcttccccttttaaaataatattagaggaagtcttaagccaaggaatatcaatgtgttattgtaagacatgtagtcaagaaggtttatcttctgtaattttatgttgcttggatcttattccagaagaaaaatattttcaaatctgccccaactgtgaattgagaaagattaagctgccgtgccttcatttcaggccacatatgcaaatctgttttataatccccagaagaagatttcagttgaccctgaaaaatgcatgactgttagtcagtgcttactccttaacattatcagtacttagtattccaagtgttgcttaatattatcactaattaatattatcagaagaaaacacataaccaaaatttgtacgtaaatacaaattttctgtctaaatgccttgcttccaaagttatcaaattgctgactatgatggagatattgggcacagttgtgtaagcattttactaggatttcagtagaaggaagaaaatgaagggctgtctagaaactgctttagccagcaaaatgtctttgtatatctacaaacttatttttaaaatatttggttctttgccgggcgtggtggctcacgtgctgtaattccagcaggttgggaggctgaggtggttggatcacctcaggtcaggagttcaagaccagcctggccaacatggtgaaaccctgtctctaccaaaaatacaaaaattagctgggcgtggtggcacatgcctgtagtcccagctactcgggaggctgaggcaggaaaatgtcctgaaactgggaggcagaggttgcagtgagccgagatcacaccactgcactccagcctgggtgacagagtgaaactccatctgaaaaaataaataaataaataaatataataaaatatttggttcttcttagtctaaaccttttaaatttttattttcgtgtatgttttgttatgtacataatctattagtatagcagcacatataaacaaataaaacatacattatgaatccatgtttaaaagtttttactgttagaggtacgtaataaaaagttgaggaccactgctttaaagaaatttccatttggagagcccatgactcacatatttttaaaagtcaaagacaataatacatctttgaaatagcaatgttaactaaaattttgtttctacatataagctgaaaacagtaatttctatttgtagttgaatatgtcatcaatgtcttagattaaatcagtcaattggctgggtgcagtggctcacacctgtaatcccagcactttgggaggttgaggtgggcagatcacttgtgctcaggagttcgagatcagcatggccaacatgatgaaaccccgtctctactaaaaatacaaaaattagccaggtgtggtggcaggtgcctgtaatcccagctactcaggaggctgaggcacaagaattgcttcaacccaggaggtggaggctgcaatgagccgagatcacgtcactgtactccagcctgggcaacagagcaagactccatctcaaaaaaaaaaaaatcagtcaatcaaccaattagccaaccaactgacaaactcttaatccttatggaaattctcttccctactaactagacctctgaagggctcagtctcacaaaatgtctaccaaaaaatatctattcacccactgaacattaaatgaaccaatcaactctgcaagaaacatatgtagtgcaatattcacttgtctaagttactgacatcatgcagtggaaacaacaaattgagtgaatttgtgcttttcccacctataagcttatcaccattgcaaaaagacctccataaatcccaacagatgattaactcttcatcccaagtagcacaggctctcttgttaggttagaattaaagcatgatcattttgtgacagttattttacttctagtaaaattaatgtttagtacacgtggtgaaccacaatttgcctttggctgtttataatttcgaatggtagaaaataccaattattgttaaacacagataacactaggaatgatgagagaaagatgatgtccattttatagaatgattaccgcaaataacaattattgtcatcacaatataacaaaatgttaaaattgatctttttcggttttggtttctgtccaggcccagtaggtactgattcttccctcattctaaagagatgctagaccactaaaaatggaattgcaaaggaaatagacaaaattcagtttggaatcccttagttaccaccttcagcttataaaatgtgttgcagaaaccaagagaggggttggaaattagaagataatttatagagagtgtttctattgtgtatcatgtgcctcctcccccatgaaggggatactcttccttcacttcaagcccaacaaaatggctccactagggcccacagtaaactgatgtcaggatgatacctgagaaatttaaagtaggaaagacaggctagttagctgttctgatagcagaacaagatggagtctataccaggatggacctgacacttgttagagcaaagaacatggagaacttcccatgaagcaatagggaatgagataaaaaagacctagcatggtattgtttcagatcatgaccaagagacctcctggaggggtgggggaaatctcagcaaaatagaggctggatgtgttcccttggatgccagaggaaatgtaattgtctgtatcaaagactgctatgagaaattcctaatgataagcgggggttctccaaaggacctccaaaaacacatcacaagagagtcaggtgttggagacacgtgcaccaatgctagattgctagagcagaaccaggcttttgctggctcttaactcctcaccttcccttggcttcacttagaggaactgaaagtaaggaaacgaggaaatagcacattggcccctctttccccatagaggaggccagctttaatcaggcataagctggaagggaaaaggtgttaacctgcagcaaatttcttaaggtttttttaaaatcactattattattattatatttttgttacatgttattttactgagactctttgaggtagtaaaataagcagagggctttttgtatttttctgagttagtagaaaagttacagcgtccattgtattttcatccagggataaaaagaacaagctccaagaacagatttgaagggcagtagggggaaaatacgaaattattttctattgtgcattacaaatgctgcttgtacagcccaatgattttaataataatagctaaaagttatcaaatacttattatattccagacaatgtctgctttacatgtattaaataattttatgctcacaacaactctataagattattatagtaattttctaggtgtgaaatttagaagcagagagtgggtaaataaactgccctaggttgtgtgactagtaagtgacaaagccactcatgtggctatttcaagcaaataaaaattcaatctcttttcacaaattctttttttttctgtcaaacatccaaaatactggacatacaaaatataaaccaaggccatatcaaatttcaacgcattaacactttgcagagacacatgaggttatatgtgatttgctgtgctttatcaagaataagaagataaagcatttgctgtgctttatcaagaggccgaggcaggcggatcacttgagctcaggagttcgagaccagcctggtcaccatggagaaaccccgtctctagtaaaaatacaaaaattagccaggcttggtggcatgtgcttgtagtttcagctacttgggtggctgaagcaggagaatcgcttgaacctgggaggcagaggctgcagtgaactgagattgtgccacactccagcctgggccacagagtgagaacctgtctcaaaaaaaaaaaaaagaaaagaaaagaatgccttatcaacagtaaaacaatgaatcaccatagtacatgggtcttttctgaaatacatatttctcccttttaaatctctttttacaggtgtggacaaccactacaaaataaagtgcagctgaagggcyrtgaccttytcaytsyaaraawctytaccdgagaadawaktaaakataygctatggctatcagcagatctgaaatttaggataaaayagaaaggagaggtatgtaacattttctttttacgttccattactaccagtcccctttttttaaaggcagccttcccaaagaaagagggaaaaaaatacattaaaattcttaaacagtagctaagtaatgaaacctcacagtcaaggtaattgattatcatggagcatacaggcatacaaaaaagcataaaaatcagttattgaatgacaagtcattgcacttttttcacgtggaatgctgaaattcattattaactggatcgaacctaagaaatcatttgtctgaaaagcatttatttatttatttatttatttattgagatggagtcttgctctgttgcccaggctggagtgcattggcgtgatcttggctcactgcaacttctgcctcccaggttcaaggaattctcccgcctcagcctcccaagtagctgggattacaggtgcataccaccacacctggctaatttttgtatttttagtagagatggagttttaccatattggccaggctggtctcaaactcttgacctcaagtgatccgcccaccttggcatcccaaagtgctgggatcacaggagtgagccaccgtgcccggccaagattttatttttataccccttttcttttctctgtgtattttctatcaagtcaaaaatgaaggccaggcgcagtggctcatgcctgtaatcccagcacttagggaggccgaggcaggcaaatcacctgaggtcgggagttcgagaccagcccgaccaacatgaagaaaccccgtctctactaaaaataaaaaattagccgggcatggtggcacatgcctgcaattccagctactagggaggctgaggcaggagaattgcttgaacccaggaggcggaggttgcagtgagccaagatcgtgccattgctgtccagcctgggcaataagagtgaaactccatctgcaaaaaaagaagatgatcctttttttccaagtgacaaattttaattttggatgcatatcagatatagaatcattaggataatgtcaaaaaattcacaatgatgtgacagcgttttaaaaagcatttagattagcaaagaaacaattaatggtatccaggtaggagaagagatgggatatggttcttagctataagcataattctgcattttgagcaatttatcttcgaaagacaattaatacagtagcttcatttggactgcttaattgtgaaagcatttttgtattccaagcttgttcagcctttttaaagagttggtttcaggttgagaaagtttgacacggttttgattttatctagtaggctggctctccaagctcctaagaaaaactgaggacaggagtgaccgcaactgctatgggttgatgttcctataaaacacctgaaataagagaaaaggtctccccaggcccaggcctatgttcttgacactttgtggatgagggaggttagctggcaggaatctatttgttccagaattccttctatcaggaagcccatctacagaagaggaaggaggaagcgccccaccccacattcagactctccagattgttttcaaatgacttccagaagcaaagtctttgtattcccatgaggatgcatgatgaatgtgtagctaaaacactagggcttcatcattgatctaagtgaaagttgtagtgccccatgttgtaacagagtagcattttcccagcwgagaaaacacctccaaaccaaacaccttcgaggtcattgaaaactgaatggggatttcaatagagttaagtaagaaggtggttccagtatgaaatactaatatattttggaaaaaattcacatgttgaacccagaacaattaatactgctttctaattacatgtcaataagctgtgggagttactgttctcttcccccatttgtatagtacataaaaaaacattttaaattcacttttttttttttgagatggaatattgctctgttgcccaggctggagtgcagtggcaagatcttggctcactgcaacctccatctcccaggttcaagcaattctcctgcctcagcctctctagtagctgggattataggcacccaccaccactccaggctaatttttttttttttttttggtattttgagtagagatggggttttgccatgttggccaggctggtctcgaactcctgacctcaggtgatccacctgccttggcctcccaaagtgctgggattaaggcatgaaccaccacacctggcctaaattcactttttaaacaatattttaaacacttatttgggggtagttattacttattttctaataaagaatatgttttaaaacataatttatatataagatatattttaattctattcttgtccttgatttatagtatttgccttyattkcaagrgaagtccttaggcatgatttttgagaaaagaagtactcgaacaagattgtctacagaaacaggtaagtccactgccaaattcacacttgtgttgaagagagggattgaaggtgaagactttggaggggtaacccagtgcggggatttgtctgcctctagcaaccacaaagaaaaaatcatttttactgggagcagcaatgcaagcctgtgaatgagatttccagttctcataaaagctgcaagcagaaaaattagcttcatctataagaattccataaggaactgagtagaagttccatataactcttcatgttcagaaaagaaatataggtgggcacacattttcaggccttgaactcacgtgggtaagaaatatgtctatttttctagcatgcaaagaacatttccttgtgtgtctcaattctgctagatggtggaaatttaatctttgcgatgttaggcaatcctcagttgttttatggtttattttgtccattttgggtctcctctccatttccccacagtcaggttaaatcatggagagtatctgaatgtcaagacatgtaggggtatggggatctggtccttggtcattagaacatcatcatcaaatatccatgctaggttctgttgggacttctatattcccattggatcttggctgtctcccacttactgcaaggtttgcttcactctcattgaaagaactcatattgagacaaccaagtataaaggggtcactggagaacctccaaccggcctgaacattgggaggaatgcacacggggctgaagcctcaggaagttcacaccatttgcgcggggaagagctggcctctcctgttccgaggtggaaactgggattcaatctgagaggcgggaagacaactagcaggactcttgctctgctgagagtccctgttttccttttttttcttttcacccgataaaccctgctcttctcacccttcaaagtgtctgtgagcctaatatttcacggttttgtgacaaggaccccattacaacaatatatctcttggtttcattctctcaacctcttagcagctctccaagacacattaggcacagaggtactacaaggctgcctctactctattgttccttcctcatgctgggtgccatggagctctataacatttactgccttctagaggtctgtcttaaaagcaagacaggttgtcctcagttctgggattctccaaactcatggagctttccagcatgcccccccatccttcagaagttgacttggggaacacatagcagagtacagtatcaaaggtccatcagtttttatttctgttgcttctcctctcttgcttctcttcttcccctttcagttcccagtattggaggccaggaaataaagcaggaggaaaaactggctctgactatccatggactcttccaaattgtgcctggaattctaggctgttaaggatattttttttcctcaagctattatctctgcagtttcaaaatggacactttgaaactcgtaagccacaaattgcctcttttctttctctctgcatttctgctctaccagacctcacttgaatcaataatatgactgcccaaatgagcaatcagacagggtcaaggaggaagtaccgcaaacaaaaacatattggttgatatttcaaatagattattctaccttacgagtrtcagagctttctagggcttagaagcaaacaactattacatgtgatttttaccttgcaatgattaataatgaagcttaccaaatagatatcaaaaagaaagttcagggggattaagcracttgccaaattcactcaattaatacagatagcaccaagattcagatctgaagcccactattcttactaatgcacactccttccccctaaagagaaggaaggaggacgagggaaatatataaggtgctaatctttaaagccctaggaagaaaacagataagaacattttgctctttaaagctggctgctgtaagagatcatgttgatatctgacagatggtagggaaaaaatgaataaaccagtcagcaattctcaaattctgctccctttcaacactagtattccatgagttgggtagaattttattttatttcattttatcttgtgtgtatatatttttgtttttaccgttagtacttaagagaattgttcttttttgaagtcaccaaaataattgtttaatacatagaaatttctcaaatttaagtttttttaaaagggattttgctgagttcatggcatttctatgacttttccctgttcaaatgttatgtttgaaaccagaatatttctgaataaatgattggtttcaccatttataataatgtggtagttaatctattaataaaaatgagagtgacaatttaataagtttttggaggcagaccctgtgccaggtgttctacattaattatgtgtgttatctcactcaatcctcatggcaactctgtgagagcaagaccattcaggaaaacaggctgaaatggggccagcaaatggctcaaaggcacgtacctaataaatggcagacccaggattggaagctattactatatatatttttaaatacctaatttaataaactaaatctattgatttaatttaattatatggcatgtaatagtcatgttttcttctagtaaaattgtttctactggtggcattaagcattttgttaaatgatggttttctataaagaaatccttagaaacctgccccaaatcgtaaataataacaacaaataaatgaagcaaggagagtatgactgttaaaacttatagttcatggagcatttgtcattatcctcaataattgcatatggcatcctgccaaactcaacagtagaatcactgaaagcgagtagctgtcttaattgtttacagaaacagtaaaccccaatcaaaatcatgacagaacattcctattgtgagtatgtgcatcttaacagttgtcctttggtacaatttttcaacaagtaccacctgttactttggtgcttagaattaaaataggtgtaattataactgttactgccccaaatctgtgccagcccctgacatgatcctcacaggacagtccttggcaattctgttccaagcctgagtttcagagctacattcacattcctacttatctcaggagacagaatcaaattctccacccaactctgaccatagtaattgtttatgtaacatgtttattaaagtgtaacacacaaacagaaaagtgcacaaatcattaagcgtatagatcgatgaattcttacagtgagcaaaccattgtaactaacacccagatagagaaacagaatggtagtagcacccagaagcttcccactacccttcatttccttccagtcactactcctcattcacccaagggtaactattatcctggcttctaacatcacagattcattttgcctatttttgaactttatattaatgggatcattcagcatgcgctcttttgtgtctgacttcgttcgcttaacattatgagatgtatcgatgtagctgtgtgtagttgtagatcattcatgcctcatccactctttgtgtgtgcctgcctggcaaaccagacaattctcctatgagtctaccaatgataatattcttttatagcaaatgaattgagctgatagacagatacatttattaatctcagtaaatgcagtagctgataaaagatgcaaaaggcattctaagagatggttcttttcattatttaacattggtatttcactttcaaggtgaaatagaaactggtgttttaacggctgtttcaaaatcatcgtctgtacaaagatgccaatgtaaaaattgtgatactattgtgcaattataaaagccaagcacagagaggttaataactgccttagttctaccagcaaaggtactcggatcccttatatttccaaggaatgaattctatttatactctttttaccaaagcaggcagggatctatggggaagtaaaagagcaaaataagatttacttttattttcccaaacagaaattaagaaattagcagaagaggccgggcacggtggctcatgcctgtaatcccagcactttgggagtccgaggcaggtggatcacgaggtcaggatgtcgagaccatcctggctaacacagtgaaaccccatctctactaaaaatacaaaaaattagccagacgtggtggcgggcgcctgtagtcccagccaatcgggaggctgaggcaggagaatggcgtgaacccgggaggcggagcttgcagtgagccgagaacgcgccactgcttccagcctgggctacagagcaagactccatctcaaaaaaaagaaaaaaagataaaaagaagaagaaattaacagaagaaacgctatgttcaaaaatagctgatgtgaaagcataaacaaatgaaacaggtaaaagcaggcttctctggataaagggtggagaaagagtggaagcccatctctctgtcctcttctccttggcaatggcagcttctagtggctgctcaaaacctctgatgcccctcataagcacgtattaccatccagacctggtaaaccggcaaattcttgacttgtgcttttgggctgggatctgaggcttctttttgatctgtgacaaaaattgcaaaggcaatttcttctcagaggtagtatttcctccccatttaatctttttcatgaactgctgaagtctttggctcctgcctgtacacactttctgttactcttcttcctacccctatttcataagtccaagcaccgtatcgatcttctgtatagcacaaacagggaagtagaaggacagcagattaatcctgagttgctatagcaaaatgacttatcatcaaagaaagagtgtgacttggaatagacctaccaggaggtccgaaactttgtttgaagtcttcatccatagtcctcaaccctcaatggtactcatacttgtactaggcacttagtaggtgcacaataaataattttttgacgaatgtgcggtatttatgtgtatttaggtgacgttgcatgtttataaagaaattaagtactcaagagtgattagtgattataatcaccactaaacttcattacgttgcttcatagataatagaaatttctcttctttctgttagcaaaatgagaggctgttcacaaatgagaagaatgggtcctttcttcagagtcaaattcctcctttattcattcaatgagaattcattaagcacttactatttgccaggttttattctaggtgctcgggagtgatacctcagtagacaaaacagatgaaaatccatgccttcatggggcttacattctagtgggtacacagacaataaacaacagacataataaataagtggatgatacagtatgttggaagatgataagtactctcagcaaggagaagaatgtgtctggaactgagggaaaaacaagtgcaccaatattgggactttggctttttggggaatcgttggatgatcttgaacaaaggagggacatgatctacttgcattttaaaaggatccctctgactgagaataaactgtggaatagactgtggggagcccagggtgaaagcaaggtagaagtagtgaagcctgtcaatagatagctatcaattatagaagctggggttgtggtggcagcagtggagagggtaagagtaacagatcctakgtatgttttgaagagagagacaacaagattactgatgtattgggtaagakagagatgtcaaggatgactttaagatttctgcctgagcaaatgtgaaggctggtgatggaacaaatggaaaggggaaggttgggaattcggtcttagatatattgagtttgaagtgtctattagacatataagcaaagatgttaaaaaaaagcagttgcacatgagtctggaatttgggagtgaaatctggcctagagatatttgagtgtcaccagcatatagatgatatttaaggccatgggactggatacaattataaagagagtaagtgtagattgaaggatgagaggagaaccaagggctagtcctggggcacaccaacattcagaagtcaagaaaaatagaaggaaccaacaatggtgactgagaaggagcaactaccaaggtagatgcaaaggcaaacaggtgtgatgtcctagacactgtgtgaagaaagcttatcaagtagaaaatgaagatcaactttgttgaatactgctaagtgaaggaagagggctcagaaatggccactagatggagtaacgtgaaggtcactgataactttggtgagaggagttttggtgcagcagtggtaggggacaaagccttataggtttgatggaaatgagaagagaggaactagaaaaagaaagaagaacaaagagctttgctgcaaaggggagcaaacaattaaaggaatacttgtcagggaaattaggacaaagagaaatctgtatctgtttttaaataatgtgtgaaaaatgagaacaacccattcaagatgttggtgacataagggagaaagggaggaattgctagagcaatgtctttgagtaggcaaggggagtggcttctagtgcacgagtgaaggcattacatggggcatggaaaattcatctatgcttaatagaaaggaaagcagagtatatgagtacagatgctgactagtcgggaaatggagtagagtctggaagttctcctcttattcctgtaattttttcagtgaggtagaaagcaaggtgaacagttgagaagctcacttcacctctaaagacatgcatccactgataatgaagggatggcaaaagatattccatgcaaatggaaactacaaaagagcaggagtagctatacttatatcaggtaaaatagatttcaagacaaaaactggataaaaagacaaggccattatgtaatgataaaggggccaattcagcaagagaatataacaacaataaatatatatgaacccaatgctagagcacccagatatataaagcaagtattactagagctaaaaagttaaatagaacctaatgcaataatagctgaggacttcaacgctccaccttcagcattggacaaataatccagactgaaaatcaacaaagaaacattagacttaatctgcactgtagaccaagtggacataatagatatttacagaacatttcacccaacaggtgcagagtacacattcttttccttagcacatggaacattatcaaggatacaaaacaagtaccccaaatttaaaaatacttatattaaatatattttctgaccacaatggaataaaactagaaatcaataacaagaagaattttggaaaaaatataaacgcgtggaaatttaaaaatgtgctcctgaatgaccattaagtcactgacaaaattaagaagaaaatttaaatagttcttgaaacaaatgaaaatggaagcacagcatattaaaacttgtgggatacagcaaaagcagtactaagagggacatgtacatcaataaatgcctacatcaaaaaaatagaaaaacttcaaataacctaatgatgcatcttaaagaactggaaaagcaagagcaaaccaaacccaaaatttgtagaagaaaagaaataatacagatcaaaacagaaatatacaaaacagagactaaaaaaaataaaagatcaatgaaataaaaagttggttttttgaaaagatacactttcaaaacataggaagaagccaaccattttctcaacacgttagctgctaccaccttgttccagcctatcaactctcacccagattttcgcaacagtctcctgacttgtctccctgcttttgccctgctacagatgtccaattaaaatgtaagtcaaatcatgtccctcctctgctccaagccttaaaaggcttcccattttatccagacaaaagtcaaagttgttgccttctccccagcttccttctgcagcctcacctctgcaccgtccacactaccttcttgttgtctctctctctctctttcttttttttagacgaagtctcactctctcgccctggctgcagtgcagtggtgcagcttggctcactgcaaccttcacctcccgagttcaagtgatcctcctgcctcagcctcccgagtagctgggattacaggcgcccgccaccatgccaggctaatttttgtatttttagtagagatgggtttccccatgttggccagactggtcacaaactcctgacctcaggtgatccgcccaccttggcctcccaaagtgctaggattacaggcgtgagccaccgcacccggcctcttgttgtctcttgaacccaccaatcatgaccttcacacaggaactttgcacatgctcttcccactatctcgtatgttttctatggttcacctatccatcttcctcaggtctttactcaaaagtcccacaatcattgtggcttccttgaccatactacttaaaattgcaacttgggtcctgtaaatttcctattctccttccctgctctgtatttcttatagcacttatcagtatctaacatacaatatatttaatttactcattcagtttgtactctgtctctccccatttgaaagacaaaaactggaaaaaaaagacaaggccattatgtaatgataaaggggccaattcagcaagagaatataacaacaataaatatatatgaacccaatgctagagcaaccagatatataaagcaagtattattagagctaataagtagtcaaagacttgtatcttgtttacaatgctttcttcagtgcctagaacagcaccaggcacatattttcagaatgaatgaatttcagaatcatacagtgaggccaggacttgttgtgttgtgtagttactccacagacatgagatgtgccatccacctaaaatttggtttggttgctgacagtgagaatatctcacatgcaccaggaagatatgaaaaagtttattactcacatcatgtggctttctggggatagtaggtctggtttccaagcaggtctgaaagtagccccagagagcagagaaacgatatggagttctagtgtgatttggcgatggggctgggatgaggattcccatgcgcaaggtagggcttgtgcagtttgaacctcctgctagtgccaaaggagtgagcacctgaactttcttatcagctttcccagatgtagggctgaagggtcaggcagggagaggtggacagtcaaacatcagaaatggggtcagaatgttcattacaggtcccatagcaagtaggactgtttgggcatttcatattctttgatcctacctggcacctagcacataagatttgcaagggatcttacaactctaggcaaactgtcttctttttcagatgaagaagactgagtccagtcccactatgtcattctgtctctgtagatcacactttgagctgactcaatagctggcttccctatggcaaggcctagggctgtggagacttaaaaacaatcttgcgcaattttttagactctgactctcagaacccttttctataaaattcttgtaatatctactgtacactttgtcagactaagggattcaatgaaagaatgttaataatgtgccatcatatgattatgctctgtgaagagtcattgctagggtcagaacatggtggtctctagttaaagaccatttggtctaggcatatttaagagaacacttttgagtataaaataggtagactataattatttaattttatatacagtaacagaaatgaggaccattgctttgtgtgggtttgatttttaatatttttttttctttttggagatggagtcttgctctgtcacccagggtggagtgcagtggcgcgatctcactgcaagctctgcctcccaggttcatgccatcctcctgcctcagcctcccgagtagctgggactacaggcgcccaccaccacgcctggctaattttttgtatttttagtagagatgggatttcaccatgttagccaggatggtctcgatttcctgacctcgtgatccacctgcctctgatttttactttttatagtgaaactttcaaataaacagaaaagtaaaaagattagcataatgagcataccaataccctttacatcagtctaacaattgttaatatgttgccttcttcgtctacttgttttggttgttgaactaaagtaaattaaagttacaatgatattttaccccaaaatacatcagtttgtatccccaaaaaataaggatattgtcctatatggctatgatgtcatgatcacactgaacaaaaataatgattccttaatatcatttaatatcagtccatattcaaactgtgttaaggcttcagtaggatgtttcatgagattttgagtcaaattctcctttgtggatctgaaactcctcattccccaattcaccgtgcaattaatgatttcttccctgtttatgggaaacagatgggattagcaaattgtgactgttgcttatttcccaaaagataaatcaggcacatcataataaggaggggaaaagtaatgtttgtaaaattccttggacaaatctctatcttgcaattatgtgtatttgcctttatgtattggagaaattctgagcattaaaccagtctcaaatgagacagtaaagttctgattggatgtcaccatctcccataattttccccagaatgtgtgatgaaagggctccagcctgggtgacagggaagactgtgtcaaaaaataaataaataaaaatgaaaggcttgaaaataaaagaaagtaagcattgagatagtggtttcaagtcactaagagtaaaaaaagtaaaagggccactttactgttttccttatcttccaatcaagacagcgtcatatattttattttattttttatttttttcagacagagtcttgctctgttgctcaggctggagtgcagtggcatgatctcggctcactacaacccctgcctcccagattcaagcgattctcctgcctcagcctcccgactagctgggattacaggcgcctgccaccacgtccggctaatttttgtatttttagtagagacagggttttgccatgttggccaggctggtcttgaacttctgacctcaggagatccacctgcctcagcctcccaaagtgctgggattataggtatgagccactgcacacagccagctttatatattttagagaaccaaaaccaggcatagccccaaagagggaatgatgcctcgttattgccaggtcttgaataagagggtggagaaatgggcacacatgtgaaggagagttaattacttgagcacaaaattttatctacttccctcaattcctcattttgctttgcatgggaattctgtatcagagaagttggagagctttaaagattttgacttttcagttgagatgatgccaattctttgtaattttgttttccactttagttgttttttcaaaatgatttttttcttttttttttattgtaggcttwgcacttctgggaggacatccttgttttcytaccacacaagatattcatttgggtgtgaatgaaagtctcacggacacggcccggtttgtaaatattttcttctctccaaagctgatttcagaatctgatggataaatttcaaaaataaaacataattctctttaaataatggttttccctctaattgttctgttctccattttccctctttccctgatattctgaatacctctccctcatcctgtggccactttccatcggttgaaataatttttcttggcaattttttgaagaagcttctgatcataaaatttcaaacttatggaaattttgagttcatcaagtatgactcttagatttaacagttgaggaggaaatgaaggtccagggaaactgacattcagtggctcataactagttactatcagactaggtaataatattaataactactaataacacttattgagcatttattgtgtgctaggtatttttctgacttgtttaatccttataacaacccagattgtcataaagaagtgaaacaacttaattaggcacagactagctgctataacacaaaatctcaaatgtcaatatgctaacatagtgcagatgttcctgattggtaaaagggaagaacaggttattaatttatgtgggttattcagggacactggctgagagtgattctaccatcttcaacatgtgacctccaaggtcagtttgggtgttaacatccagccaggaccaaggagaatagagcatggagaaggcatacttgtttcaaagccaccttagcagggaagcagtacaaacaattccacttatatttcattaggaagtactagtagctcactcccatctagatgaagggagagacggggaaaggctcttccccactatattataatgaaactgaagcataggcctcctgactcctcatgcaatgctcataccactacatcatgtctggctaaaaaatccagagcaaatgtctttgttaaaagttttgccctcaaaagagaagactaatgattcttttcctgaaaatgatacgccatgaagttatttcttgcagataacgtctgctttttatggcaaccaccctagtataaagaattcacctcatttgacttgctgaagagatttcaaataactcttctttaaaccttttagttatgttatttcagatgggacaatgaaagtattaagaagtgtgattagcttctggattctagggacaaaaggaatcaaggaacataaattttttcttccaaataatctgcctctgacttggattatatttgtctgataattctgcttccacaaaagtgaaaatatactttattcaaaagcaaatattacaagctgatcaagggatgaagccagagacatacccaagcaaagtttcagtgaggattctctatataggaccaggtgaaagatggtgaatgagtcatatgtaaagcactggttggaagagggttcagtgggaggaacagctgagcatccaaaaaaggagttgagcagtgcaggttggcagtcagaaagaggtcaggatccagaaatcagtgcagtgggcaggatcccaagatcaagagacaaacagccaagcatgggctgaaaattgaggatgggtataaacgtgctcttttctgggcttgctctccacacaattctcactgcaagtccttagttagaggagctctacatagatgctgagcaaaacagtctgcttacagttttttttttttgttacaagttccaaaatgattgggacattttgagtccatataattattatagttccattgctacatgaatacatgggtccatgaaatggagtccatataattcattttgaccattttgtcttatccaaaacactgaaaataatagctactccttaaagattgtctgccgtggacctcttgtgctattatctctaaatcttttttaaaatcttgcaaagtaagtattattggcctggttttatagatgaggaaagcatggctcagagaagttaatggagcttagaagctgactaagtcagggtttaaatcaagctgtctttattttctaaggccgtgttgttttgattaccccataatgctgcttctattcagcccacgagaggggcagcgaaacaagttatagaaaatattgggctgggcgtggtggctcatgcctataatcccagcactttgggaggccgaggcgggtggatcacctgagtttgggagtttgagaccagcctgaccaacatggagaaaccccgtctctactaaaaatacaaaaattagccgggcgtggtggcgcatgcctgtaatcccagctactcaggaggctgaggcaggagagttgcttaaactcgggaggcggaggttgcagtgagccgagatagcgccattgcactccagcctgggcaagaagagcaaaactccatctcaaaagaaaagaaaagacaaaaaaaaaaaaaagaaaagaaaacattgacaacattgacttgcacgtcaagaggtccccaggacaacccagaggtttgatgattcactaggagggctcacaggactgagcatatagtcatactcatagttatgatttattacaatgaaagtataccaagcacaatcaatgaagggaaaaggcagaagcaggaaaatgaaaggagtttctgctttgtggagaaaatgacagattaggcactgaacatattgcattaaagtttgaacctctgagtgcaaatgttcacaagtcattggagataaagaccttgagtgaagttgagagctgaagaaatataaatataagctcggtggtaaaaattacctccatggtctcaatgtgggagaattgcagaaggctgtgccatgagaacaggtgcaattaaggagggggaggaggaaatcctcagggcacaaagagaacaagcatagtacaatatcagaagaggctsgcatgggagatgggggatgtcagaaaaaggagtagagtagctattgtagaaatctgactttcttttgtgtacgtcattactgcttaatctgccaaaatatctgacaaacaagatatgctgggactcagaaattcaataaagctaaattgaagaagacaagataaatctaccaccttccacagatgcaattgaataggagatgtaaggaagcaaatcttaatgacatctaccttgctgatatgcaccttgtaaccctcagcaatcgcttcctttgctttttgtagaagtttaacattttaaggtgcaaagggattggaggatgattaaatgacattgctggccctttcaaatcaaaagaatcatgcatgcctgacactgattgacggtgttgcttcttcattgctggtccagctgctttgggggcctggtcgaataaaaagtgcctgcacattgttgaaagaagagcctgagggagaatatagtgagtgtagcaaccaaaagaaaaaaaaagaaagaaagaaaaccgggccagtctcttgaaagctgttaaatgcaatttccatagtgccacttatttgttcaaatgatttaattgttcatttattcagaaatagttattgaatgcctcatttttcttccagacattgttttagcactgagaataaaatgctgatcaaggctgggtgcggtggctcacgtctgtaatcctagcactttgggaagccgaggggctgggggaatgggggtgggtcacctgaggtcaggaccagcctggccaacatggcgaaaccccatctctactaaaaatacaaaaattagctgggtgtggtggcgggcacctgtaatcccagctactcaggaggttgaggcaggagaatcacttgaacccgggaggtggaggtggcagtgagctgagattgtgccactgcactccagcctgggcgacagagcgggactctgtctcaaataaataaataaaataaaatgctgatcaagtcaaacaagtttcttgttagagtggaaattgcattctggagcgaggaggcttttgctaaacaaatgaacaaagcatgaatagaagagcaggttgaaataagtgctatgatgaagctaaagccgggttatttgttggtggggtggcggctgccttagattgggtggtcagggaaggcctctctgaggaggtgaaagttaagagctcaataaaatgacagagccaggtacgcaatgctgtaggaagagtgtcacagaaagaactgctgatgcataagcctaaggcagcaacaagctggatgtgttcaggaacagaagggaagccattaatgttctaaaatcttcaaacaaatacattttgaacctgatttttttttaaaaaagcaccttacagattggtcctcagtctcacccaccaaagaaaggaaagataaaatcagaacaaggaataaaaatcctaaatacacattcaaaatccaatgtattgtacagcagatctttagaacttatttatggccgggtgtgttggctcacgcctgtaatcccagcactttgagaggccgaggcagacagatcacctgaggtcaggagtttgagaccagcctggccaacatggtgaaaccccatctctactaaaaataaaataaaaaaaattccgcacacctgtagtcccagctactagggaggctgaggcaggagaattgcttsagcccaggaggcagaggttgcagtgagcccagatcctgccactgcactccagcctgggcaacagagcaaggctctgttaaaaaaaaaggccgatgcagtggctcatgcctgtaatcccagcaccttgggaggccaaggtgggcagatcgcgaggtcaggagtttgagaccagcctgaccaacatggtgaaatcccgtctctactaaaaatacaaaaattagccaggcgtggtggcgtgtgcctgtaatcccagctactcaggaggcagaggcaggagaatcgcttgaacccaggaggtggaggttgtagtgagctgaggtcacagcactgcaccccagcctgggtgacagagtgagactccatctcaaaaaaaaaaaaaaatatatatatatatatgtaacttattcattcatcttctataactgaaataattgttgaacagcaatgctcattgccccccacctccaacccctggcaaccaccattctactttctccttttatgtatttgactattttaatacttcacataggtggactcatgcaatatttgtccttctgtgactgacttatctcacttagcataatgttctccgcgttcgttcgtgatattgcatatgccgggatttccttctttgtaaggctgaatgatatttcattgtgaatatgtaccacattttctttatccattcatctgttgatgaatacttaggttgtttccacttattggctattgtgaatagtgctgcaaggaacacaataatacaaatatctctttgagtttctgatttcaattactttggctaaatacccagaagtgggctaaatcatatgataattctatgttcaatttttcaaggaacttccacactgtttttcatagtggtggcaccattttacatcaccaccaatggtgtggaagaattccaattttccacatccttgtcaacacttgttatcttttgtcattttgataatagtcatcctaacaggtgtgaagtgatattgcactgtggttttaatttgcatttccctaattattagtaatattgagcacattttcatataccttttagccactcgtatgccttttgtgcagaaatatctattcaaatcttttgcctatttttttaattttgacttttatttttttgctgttaaattgtaggcattccttatattttggacattaaccccttgtgagacacaggtgtgcaaatattttctcccattccataggttgccttttcactctgttgattgtttcttttgctatgcagaagctttttagatctcatttgaagtattattacaataaaaaagtcttacatttagagttagtaagattttaaaaattagatcataataaacaagtatcccaaagaagatctgacaattaaggagagaaaaaactgtattgttcttttcttccttgttacaataataaaacctattcactatacagaatattgtggctgaaatctcgttagcttggtctgagttgcattttgtataatctagaggtgactgaaggggagcactgaggtggagctgtccactgatattttggaggagctgatatgttggagtctctaacaccacactcaggtttgatcatttattrgaaggactcacagggatcagcatacagtgatactcatggctaagatttatcacaacaaaagaaacaaagcaacatcagccaagaaaaaaggtgcatgaggtaaagtctaggggagactaggcacaagcttccacaagtcccctcccagtggtgtcacacaggatgtgcttaatttccccagcaaaccagttcccaaggcttttactggggactggtacaaaagtgccctctgcctagtgtgatcccaaattccagacacccagaaggaaagcaggtgttcagcataaaacatagtgcatatccaaacagtttgggcacagtggaccacccttctcatttctgggaatggtgggaaccctcctaaagtccaagttcctagatgctagccaagggtcagccttgtaagcagccctttgaaggacagccacctcaaggcgctatgttagcttttttctgcataatcaggctctcatctctcttctgaattttgctcaatttcttttacctagatgtactgtaactggtaagggagtgtatgttatatccatgggaagacagccttaagatttgagttgttttcttgcttcagcatggatccctggaggcctaggttcccctggatagaatcagtcctattgctcacttccctttattgaagagtctctcttaggagctccttctcaccccctaacatatcagaaaacacaaaacatacacatagatattcagttaagtttacttcagatgtgagggtattttcagattttgtcatttaccaggtgctctactggggttatgaactggatattctttttttttttttccttgttctgggcttgtccttttagatgtgacaccagaagtgaccaccttcgcgtgactcagatcactgattttttagaagatttaaatcatatggaatttagcaacagcaagtggggcattatcactccagtttcaaggctttctgtttcttctgtaatgacagcttttcatgcctaatgctcagcgtactactgaaaagtgcataatagcttcccagtcatttgtcttctaatatagtacttagtaatgcagcttcaggaaccacgtgtatgaaaggctccatataaaaccaaataatgtaacactgttctactctaatttctttccctatagatgtaatttacttatggtagtgattgctaaaatgtgttcagctaatttgtaaaaccagtagaaaagaaaatgaatgtagaccactatattagtttcctatggccaccacaacaaattaccacaaacatggtggcttagaacaacagaaatttattttcccacagttctggaggctagaagtccaaaatcartgtgtcaacaggaccacaattccctttccagtggctttcagtcatccttggcattccttggcatcaccccaaactctgcctccatctttgcctgggcttctctgtgtatcttctcctcttcttataagaatatctgtcattgaatttaggacctaccctactccatatgacttcatcttaactaattacatctgcaaatatcctacttctgaaaaagctcacactttgagtttctaggtagacatgaattttggggaaatgccattcaacccactataaccacatatccacatgtccctatgacaccataaaaggggtttccaatcattgctattctcaaataatgaaagttatagagggatttgtggatgaggcccaatcctcaagaggagtgaaccattgtcatattaaaaggaatatttataaaaaaaaaagctggaatactgttattcaggtatttataccaattatgtccagactaaaaatgttaaaggttttacgatttttggtaaaatgttttaaaatattggtacctaatgggaaatatatatctcatgaggtagtaataaattggtacctaatgggaaatatgatacttccatgaatctttacagagaacaccaagaacccagcaggtatgaaaattctatatttttgggaaaaatgattacaaaagacagtctctcacaccatgaacaatgatatattctcttagaggcagtgtaccagagcgtcaaggacaggggcttcaaagcagagtcacagtttggttcaattcagagctctaccacatgctagccctcatggtttgggccagatgcttctgagtctcagtttcctcagttgcaaaatggagatacttatacttatcttaatgcattatatgagggtaaatgagatcgtgcttgtaaaggacacacgcacagaagaaattcaagtaatgttggttgaatcaagttatgatctaacccaatctcaagacaagcactgactcaattttggctatctctgtggttttcctaaacaggttacactgacccactgaacttccattagcatattttgaagaagttattctaaatgccattataccccattcatttttctctaaggtcttcaaacttgggatctaacatttaaatcaaaacaacctggccattatagatccttcattaataaattgaatatggcaattttattcaacatctctggcttcttccaacaccagcccatttgacaagaacccatctaggtttgctgagagtattatctatcttatttcctcatcattcttatgttgatataactaaaatcatctgggtagagatgccagagggctagaatattctgtttcccagagggagattcagagagtttatctcataatcaatttacattggggatagagattaagtctgcttaagtctccttttgggacttggctgaatttgacaaaaaataaaatcagaaacatccatttttaagtgattacagggttctcaaggatgtaatatgcacaaccaaaacatccttcctctatctcccagtcagctgttcaactggtaagagttgtcagtgaaagaaactggagtttagagggcatgcagtctgattcaaacaaggcaggatggagacaaaagagaaaatggataacaggaccctatgagaatacaacctctgtttgcctttggcttttgagacacttgcaccatgttccaatactttaggaacaactgaactccttttaagagcaccaggattgctgtatgattgtccatctcatcaacatccatgtttgctcatcaacatccatgtttgatctggcccagcacactacttgttttttattttttagtgtttgttcacccaaccacactaactctgcaccaggttttcctggggtcatgagaggctttgtttattgtctttttttgtttcattttgctttgttttgtttcagccttcagggtgttttcattaattcctaaataagtttcaaacttataccaaaagaaaaaacaccaagcaacaacagaaactaagggttggaaaggatttatttatagcaaccatccttttcatggagagagtgaccatcactctctcaaaatggtcattgagccctgcataaatcatcccatcattctcagcaaactattgcaaggacaaaaaaccaaacaccgcatgttctcattcataggtgggaattgaacaatgagaacacatggacacaggaaggggaacatcacacaccagagcctgttgtggggtgggggaaggggggagggatagtattaggagatatacctaatgttaaatgacgagttgatgggtgcagcacaccaacatggcacatgtatacatatgtaactaacctgcatgttgtgcacatgtaccctaaaacttaaactataaaaaaagtacccagtactaaggcactctttatatactcagctattttgtctgatatctatgtagtctgactgttctcatcaaaagtttatacaatctgactgagaattatctttgaaattgagttagaattggtcttgctatgattcttctcattgttctcccattttattagtatctttataaactcattggatgctaatacatttgaaggtttcaatttattataattattattcttattaattatcaaattgtcccatatttggtcaatgtcatctttgttcaagttgggtcattttgacctaactccatcagtcttcgataactctcttgctttgtggtgtgacaagatgttccaggctcatcttgtacatttctttattaagaccaagaattagccattgctctaagaagacttggggcattttcaattactttcaaagtcacacttgggagaaatttcctttcttgaatgatattttgtctgattattaaaataatattccttttgatagaatatactaaagaagattaaaaaaatagagccactgataccaccatcatccagaaataatggatgttaacattttatctctggaaccatctttccacttaaagtttcatgccgtgcctttcctttttctaaacagtaggaaaagagatgatgaatgaaactagacattttaaatatttagacaaaataggttgaacacatgttttaacttgttaatcatttttgaaaaatcctaatattggccattaaacttccagggcaagctggtatatgtgggaaactttaaatttgagtaatttggattttgcaaaagtctttttgctaccattgttggctaatgccaaagattgtctgcagagctgtaagaatgcactggaaggcaaacagtactgtatatattaatagaaatgaaaagagggtaaaatgaaaagtcattatagaaccagagagtatttttttaacttatcaacttttcatgtgtagcatgtataataaagctcttacaatgtttaaagctggggttttagattgatggagagctctataaatcccagattactattaatgtgcttgtagtccagctctagttacagggttgtcattgtttccagtgaaaaggtttgtttttattttttaaagatctttagtagcctggaagaattaaaatggtgatttctagcaattttaagcatgaagtagataccaatgtcattcacaaaataatatgaactaattgtctagttaagtgtctttaatatctttgttcccctaagtgagtccaacatgaaagcaacctaggagctgctccctctccacccccatatcattggattccaccttactcgaagctcctgtggctgaaagaggactaaagtggcattttctgccaggctttgtcacgctcccttttgcccacaggtgctttaacctccaaggggctttttgtgcctacagggatattccgcactctttgtcctttgtttacagtccaatttcataaccttatgaatttgtcaaacatttagcattttttaaacctaaaataataaacgttcctcaaagcacagctaccaagtcaacggcgtaaatagcccttgggagcttttcagaaatgcaaattctcaggcctcaacccagacctcctgaatcagaagcagctggctgtattttaccaagtcctcctggtaattctgatgcatattcaaattttcattgctttaaatattcacacactacttatacaaccaataaatcaaatgtatattaagtgaacaaaacgaatctactcaaccatttacacattgattgcaaacttaatgaaatgcttttaaacatttaacttaatcacaagcctaacatttcagatttccctgcattaaacatcttacaaaggaaaaaatacacgtaaaataccacgttgtttacatagccgattattattttgacaacaaaactgggcacaaagctattaatatcatagatttaattttgtttttttattcttaaatctccttttatttttacttttgtatggtcctggaatttaaacttctgtacattgctggattgttgggaattctacaagagactctttatactttctcagggtttatgtaatttttccagactggaaagaacaaacatatcacctcgggaagtcagggatacaggttaagtggattactggccacttaattttggttggttagtgggaacgggttgctaaattcaaggtgacttaaactcaagttgctggccactagacaataattttttatcacatagtttttgttttttgtcatggaatctatattgttttctcattgctgctttaacaaattaccacatacttagtggcttaaaacaatacaaatatattatcttacagttctggagggcagaagtctaacatgagtgtacagggctgtgttccttctggaggctccagaggagaatccaattccttgtccattccagctttcaagggctgcctgtatccttgggcttgaggccccctttttccatcttcaaacctagtgtcttcatagcttctcctctcatttctaacctcctgcctctctcttattctctagtgttatattgggcccacccagggtaatctccccatctcaagatcactaacttatgaatatgaatcttcaaaattccttttgtcaagtaaagcaatayattcattggttctgtgggttaggacatggacatctttggggaccattattttgtctaccacatgacactttttgtcaatgtatttcacatttttactgtgcatacacatatacacaatgtattttttaattaggctttacaatatataattttattgcccggtttacaactaaatatattgtgaacattttcttttcttttataacagttaaaataattgcatagtttggagaaaacataatttactaagcaatcttgttggggaaatttaggtataatttttttccaaggagatttcattcttttacaatgctgttagaaaaaaggagagtctgtcttatataactttctatagatgatggaaacttgcccttcaatttagccttttaacttgcttctctacatccacctaatcatcagtcaagtaattcattttcttttttcgtgtccatctctcccatttgcttcctcttttttaccccatctccctggcacacatgcagacagatttctattactaccccagcgctttctgatccttccctccatggcctccctttaatgaggctttctttcattttaaagagaccattttaattgattttgatcaactctactcaaaactttatcctcagtttcgcattaggattagcctttaataatctgaagatataattcaattgtttaaaagaccgtgttaataagaccttggtagagttacatgtatcaagaaacataggacttgggcacaatgtacatacggctgactttcttttgaaaaaggaaagtagtttctgggggrgggcagggcagaggtaagaagtaattggtacgtgaaggaagtgaggaagtgttagggaccattatggaaatgtattctttttttgttttttgagacgaaatctcactctgtcacccaggctagagtgtagtggcatggtcttggctcactgcaatctccacctccctggttcaagtgattctcctgcctcggcctcctgagtagctgagactacagtcgcatgccaccacaaccggctaatttttgtatttttagtagagacggggtttcactatgttggccaggctggtctcgaactcctgaccttgtgatctgcctgcctcagactcccaaaactgtattcattattttaaggcaactaacaaatgatcttctttcagttaggacattggagcagcagactttactggtcatgaaatttgcatgatatctaaagttgttatttctggaaataggtaaatgtcagttcatagtaactttgtatggaaaggcatgtgccagctagcataaaagtggtacatgcagatggtagttttccagagtcctgggagccatgaggtgctcaaacatcacaaggccatcacaaccaggtagaaatgcctcaggaaagcagaggggttggccatgccagcatttacacataaaacgcttcttgggcagccagatgacatggtgcacagacccacagttctctctgcacacaacatgctcacagttccatccataggaggaagggaagacacaaaagcaccccagcgtgcaggttcccccatttggacagcaggttctgttttgttccttactgtcctgtgtccccatggatggcacaaactctgaaataaggatgaattgcaggctcctcctggggctgagtgctgtcccctctgaaagccaagtcttcctgagatagacatgcaagttatggtggcccaacccaacctggccaactaattctagttcaaatgcttttgaaatggccatgatcaaaattacactccgtcattgtcccctgaacgtttaggcaggccagaggatgagagagagcagccgtatttttatcttttaaattgattctgtttttttttttttgagatggagttttgctcttgttgcccaagctggagtgcaatgcagcctctgcctcccggattcaagtgattctcctgcctcagcctcctgagtagctgggattataggcacatgccaccacgcccggctaattttttttttttttgtatttttagtagaaatggggtttcaccatgttagccaagctggtctcgaactcctgacctcaggtgatccgcctgcctcagcttcccaaagtgctgggattacaggcatgagccactgcaccctgccatggattctgatttttaaagaaatttagaagatttaagttttgtttgtttttaatctctggcagcacatgactcattgcaatatttaataatatattaacctggcctggtttcaatatttaaaaacattcatctttcttattggcattgtgttgtaattaattagttaaatcatcaaaagttttcatttccagagaaacagaaaagtgaatcttaaaatttagacttcttagccaagtgcggtggctcacgcctgtaatcccagcactttgagagtctgagacgggtgatcacctgaggtcaggagtttgaaaccagccaggccaacatggtgaaacctcgtctttactaataacacaaaaattagccgggcgtagtggcgcatgcctctaatccaagctacttggtagactgaggccggataattgcttgaacctgggagggagaggttgcagtgagccgagatcatgccactgcactccagcctgggcgacagagcgagactccgtctgaaaaaaaaaaaatttagactactttttatggacatttaactaagttagtattttggagtaaatggttattatcgttttcctcattggaaattgcatatgcgactggtgctagccaaccgctggactccttttctagttcacttatatatgagaccacaaatgctgctgaggcctgtttattcatggtacagtttctactatttctaggactgtttggcttacaaattatgttagtaatttgtggcttatgcagataaaaacaatacatatctatactatatgaacagaaatatacttaacaaaaacccacaaatatctatctatagttatatataaacactttcctacttatgtaagtaaataaatttacatgtacataatattcactcttctttgatattactattataattttgtacattttatttacattaacttttttcttatgtacatcatgtccctttagaagcataatttatttcatttcatgatctttattactacaaatgatcacaacttgaaaaatgggagctcctttaagctgactgtttttctttcagcagtgcctctgccatttaaaaaacaaatcactcttgtttcctggcaagaacaaaatgttacagacctattctgattttattctgcccaataacgtgaaactgactatcctctaatggtttctggttctttttttaaaaatagaacaatattagagacaaaaatctggtcactagggatgtttacaagtgtcaagtggggaaagactacagctactgctgctgccttgggacttctcttgctagcgactgagcttaaagaaaatacgtcttttataagtgtgtaaaatcttgttctttccagtatagcttatcatatcgttatcccttacttttcttattgtatgagatttcagcaattactaagagtttcttcctctacattgatccactgtgtcacccagtggcacagtagcccactttcctcccacctcctctctcactccgttttctaggacaatggttctcagcctagtcttcatactggattagcttggggagctttaaaaatgttgatatgggtctcactatcatagcttctgatttaaccttccaaaaagcagaatatggcatcaggattttgtaaaagctccataggtgatactaatgtgcagccaaagtaaagaacctctgttctagaaaagtgttgcaacctgaataaagccaaccaggcatactcccatgaaattacaccacagaggttccagggataccagcttgacattataaacagaaaaattaaatgcatgcttatcttttgactgctttgcttcaggagttttggggatggggacttgctaaagagagaaaaacacacctgcctttttttcagtcttcttgaaagactcatgtgtacaggtcgttgacttctccaattgttctgctagcatttctgtctttcagtctcatcttcctcactccttcctaaccttgctctaattacttcaaggttttaaaaggccttgatttcttcatctttgaggttaagataatgtctgcatgtgacacacactaaatctagcaaaattcaacaacatactgtaaagttcgagaaaaccataacaggttggcagcctaaggtcctagctgcctaaaatgatttgagaggctataatagaagtcaaatctgcttttctggctatgagattccagaaggtcaactgcagtgttaatccagactttttttatttgtctgtacacactttagggagtgctacatgtttaaagaagtctgaagtatgacctctaggattaaacacccctctgcccccaccctctccttctctctctctctttcttggggttttagacatcataaaattaaccaattcatctgatatagggaattgatagttgattataattatataccttattgacatatctacctccacttaagttacttttccatgacagaagcttgcattcttatagtatgaaaaacagaatgtctgttttagtaagaggacaaaggcctaggacctactctatttctgtgtaatctattagtattagttcttcacttagttccgatacacacccaagtctgggaaccattgtcttagggcatcaaataagtaagggtagttgcttctctaacgagaagggccttaacagaaggtggtgaactattctttgctcagaggagtttagctgcctttttccctcaattccctccctgccaaggatattatagacagagtcttctgtttttgtgggctgccatctcagaagctttgtctagtcttgatatattgcctggttaggattttaagaaaataatagatgatgctttcaaaaatatggcagtctcaattccctctttcttaggagtctcaaactttaatatgcaaatgaatcacctggaaaccttgttaaaatgcagattctgcttcagtaaatctgggtggggcctgaaattctgaagatctaatatgctctcagatgatgctgatgttgctactctgaggggcaaggtgctagctttggttctcaactttggcagcacgttacaatatagtaagaatatttttaaaaataatgatccctaggtcccactcctagagattttgatttttctgatttaattgatagagaatatggcctgggcatcaagagtttaaaaaactctccaagttgccaggtgcggtggctcacgcctgtaatcccagcactttggggggccgaggtgggcggatcacctgaggtcaggagtttgagaccagcctggccaacatgacaaaaccctgtctctactaaaaatacaaaaattagctgggtgtggtggcgagcctgtaatcctagctacttgggaggctaaggtgagagaatcgattgtacctgggaggagggggttgcagtgagttgagatcacgccactgccctccagccagggagacagagcaagactccaactcaaaaaaaacaaacaaacattctccaagtgactttcatgtgcagcaaaatttgaaaaccccttgtcttagtccaccatcaaaagttaaccaatatcacatttttttaaaaatggctcttttattcacttctcatgctataaaatatagcgcgcttagatagttcaaagcagtggtttacaaatctctatccccactgaccctggtgtggagaagcttccatcagaagtggtagaataagaaaaataaggataagaattatatagtaaatttcataaagctcaaataattcatttcaaggatycttctttgaaattgtctttcacacctttttgatgttaaaatatcctttttaaattaaattaaggtagtaacattatacctgtttatttgcttttctcatgctcttaatttggtaaataaagagttgcaaatcttatgttgatctccacatatttttggaaatcttgctggttcatgaaatttgaaaatctgggagccatgggcatgataaatccattaaaaattagaaaaaatctgatctttaagtctagaaaaatattgttayaggaatatagtttttaatctttgattctctaatccctggggccaagcagtccttgaattttgtaagcaccagagtttattgctttctgtgtcagttcaggtccactaagcagatttcaagaaggaattagacttgcaagagatttattgagggaaccaccaagaaacataaagagagaggcagcaggagtgggcaagagggccttcagacagggaggcaggtctgacccctgtgggaaagaaggatgcgtgggtagggagagagcctcagccagtagcgcagctctgagaaagtctcagccaggctggtggggagccccagagcacagactgtctatcagagaggtccctgtcacgcaggaatggcccagcgctattctccccactgtgttctgtcatcaggttggaacagcctggggagggtggccttggcaggaatgctgcagggcatccgaaggtgtagcagctagagtgtcagccaatggctctcctcacagcaagttctcttctgtagggcgatctgtgtgtgcacttccatggctgccacactgggacttgcaattccacagtgaaaatgtatcttttttctgttggatgatgtgaaagaaaattagccatatggcaggtcattaatgtttctccgtatatcttgcttttggtcttgtcccttttaaccaatggccatttattaattataactcatcattatgtctgctgggcccacaattatctccataaaaaatgtaaaatcgctggtcactggataagtcgtgggaggtagaacatctggcttatgtaatgaatacatgtttaatattaccttttaaacctgtaatgttggtaggttttcatgtagtaaaaattctatttattagtatttcttgttattatttctgatcttatattaaataaggcattattaagcataattatcttagattatctttttcttggtttgccacagtgtattgtctagcatggcagatgcagtattggctcgagtgtatwaacaatsagattksgacaccctggytaaakaakcatccatcccaaytakcrrtrggctgtsakatttgtascatcctatccagatcctgsctgdtyrcctcaygctccasgttggtttatttatttgtcttacaaaagagcaaaatcaaataattcctgacttgctttaagtgaaacagtttacttaaatcatggtattggtgttttattttcaaataccagcttgacaaagaattacagcttrtgtgtgcattttctggggaaaacaggacattgttaaaaacagactctaagatcgctctgcactcaaccctattcccaaacccttttagcccatatctcatcttatgttctgtcaatccctttgatttttcggtgccatatttaacacaatgaatgaatagagaacactggagcatacaaaatggacaagccatatgtgattctatagacatcaggtctgtggcttgggagtgaagactggtggagtgtgctttgaatattcaaaaaggttagttactaagtcactctggaagagggggacactttctatcattttaataarctggttatttaaagtagggttaagaatatgcagaatttatagaattggggctcaaatttagccattctagtcctcccaaattaggaacttgaataactttgaaagattcctcttgtttggtttgccacagccaatctacattatattgcccctggaaatcctaacagccatggtttctatgtctatggataactctgaggagacaagataaactggataggcccatcttcttccacatttgaataaactacacacatttaaatgtgaggttaagctcaaaataaaacactttggacatgaggatgagatccatgcagagaagatgatataattatgtcagataccaaagtggctgtctgtgggtgtggctttacatatacaccagataatttaatgcttccccctggggctttatcattactagattataaattcattgagggaaaatgagctgtcctattcatcataatgtcccctgcaggaccttgtgcaatgccttcatataggagacacttaaagtaggagctgaatgaataaatagcagcttgttaagagcatggaatctaaatcagatggatctggaattaaattctagcttagcyaactagtagttctgtgatctccaaattgcttagcctttctcttttttaatctttttaaatatataaaatatatgaaacctacagacacttcaagaaaataaaacaaacattcatgtgttcacacagttttgtcaattcttaacatgatgttgttactttataattctttgctgtttttcaataaaacattaaagatagagttgaagcccaccatgtaactctgcctaatcttattttcttcctttccacaaatatgttattatcctgatgttagtatctttacacatatctatagccataaacaaccaacagtattattattattatttttgttattattattatttgagacagagtctcactctgtcacccagactggagtgcagtggcatgatctcaactcactgcaacctccgccttccgggttcaagcgattcttgtgcctcagcctccggagtagctgggattacaagtgtgtgccacgcctggctaatttttgtgtttttagtagacatggggtttcatcatgttgaccaggctggtctcgaacttctgacctcaggtgatccgcccaccttggtctcccaaagtgctgggattacaggaatgagccactgcacctggccaactaacagtattattgagcatctttgtcaacttcgtataatgggaacatgctctgagccactatgctacactgttccaggtattctgtatttcccctttctcataccaaagaatttcagctccataaaagcagtgatttttgtctcctttgtttattgtatctccagggccaaggacagtgtctcagtgtctggatgttartggtgctcatttgtatccaatgagtgaatacaactaagactcagatttgaaatgtatgaaactcttagtctctgttcaagttcatatggtgtcttggtttaagatattaagacattttaccacgtttttgggattattgtacattcatattattgagttgctctgtgtaatgcaaaaaaattgggaattcattccttctaacaaggcactaatactgagattaagactatttattttaaccttantaattgctacacataagcgaatttacgcctggatttcatctccttcatcccgtgccttttaggracwckrtagctctctgaaasgtcttaccctcagctggatcrgrkwtrrgaamartatcctgymctscatcrygaksagmrcagcgaaattcggaatgcaccttsaggcagctactscaaaggtagggaaactttttgccttgaaactaacccctctcttaaatcatcctcrgatgcaattacccagtgacaaaaaaagctctcttccatttaagtatagcacaggtgaggccacagaatttaggttacgttaccagccctactattaaatagctatctggcctcttgagagtccaatttcccatctctacaataagagatagtcttggctgatgccttttattctatgagttagtgttaaaagcatgtctgaattattcctttgaataccctgctgtaggccattatgatgactggcattgtgcattaccaccacaaaggctgaagaaagcaataaaatccaggcagcatagaattctcaacccatgggaatgatactgtcatttttctaacactgcaatttggtagaaaaatgtgaatccaatgtgaggatcacagtgatggcatctacaccagcttagtatttcaaaactcaactctggggaccttttggcttagaaaatttgagccccacatggctatgaaaatgacccctgcatacttcctaccttgctgctctctcacagcatgtatggaatacatgacttctttcataggcccaatgtaaaccttttgatacacaagaaactggtaataattgttgcctctgaggagaggaactgggaggtttgaggatagaggtaggagggacactttattttgaccatacagtcatgtgtggcttcataacagggatatgttctgagaaatgggtccttcgatgactttgttgttgtgggaacatcataccgtgtacttacacaaacgtagatggtatatatttttatttatatatattctttcacatggaaaaataaatgttccagcaccattactaaatatcaaccttaggccaggcacaccaccacaggcacaccaccgtggggatttgtgtacaggtgatttattaaggaagtactgccaagggagatccctaagggattagggggagcaggacagggaaagggaagaatctaagcaaggatgccatttacagtgaccaaccatcctgatttgctcaagatcaagagatttctggggacatggggtttggggtgctaaaattgagagtccgggcaaaccaaggtgatttggtcaccctagtcccatgtcgtgcacagtcccacagaaagtagcttcagcctgatctcacaggtgagctctggagtgtaagttatgccctaaagttatcccagcattggtcaagggcagcagaagaggtggagtggtaaatcccctggcacttttgatgggaaaagcagcctggtagccagagagctgtcccctgaagacaaactgcacgcactaggtgttaaaaacactgaaactggggaagggagcagaagccatgaaaagggatcccccgggggcctctgagtagatcaccaacatcatctgctgcatccagccaaaacaaaactaaccaccaccaaatgcttcaccaggtgtttttatcttgctgtcttggattcttagggctgccataacaaattactacaaactacacagcttaaaacaatacaaatttactctttcacagttttggagactagaagtttgaaatcaaggtgttgacaggccacactccctcggaagcctctcagggaggatccttttttgcctcttcctgcttctggtagccccaggcattcccattttccctctgtgtctgtgtctctctgtacaaatccccctcttcttatagggacaccagacatattaaatttaggcccactctaatccagtatgaactcatcttaactaattacatctggaaagactctatttccacataaggtcacattctgagtttctgggtgggagtgaattttgaagaacactattcaaccaagtacacctgccatagaaaaaatgtactgcatgcagtggaagtcatcctattatagtaaatttgagggactcagagagatgacccttacaacagataattctcctcttttattcagcgtgaactgaaataagggtcagatccgatatgtgcttaaagcggcttttattcactttatgggaagggtgagtacactctctatacaaagctagtttgaagaaaggctctgtattaatgcaaactcttattgcatttggttcccacagatgaaacatacattaacaataattgctccctgctatgaagatcttttggaaggctttattctgttgaagaaatatatggtttaaacattttattgcatgccaaagatgttttattaacatcaaaggaaaaaattctaatattacagagtaattgcagtattgttcttaaggagaaactcatttaaatgataaagagtactaaaacctggttaaaccttggtgggagtaagagttttgcaaagtcttctggaaagtctgatagtgcaaaagtcattccatcaatttgtaagtcttcagttgttagtagacctgtttcctttaaagataaagctaggagatttattgtaaattttagaaacactgaaacgtttccaaggccatgattaatctatttccccattctttaaccaagaataacttacatgttcaagaaaaaataattttgtccatgattgtaaaattgctccataaactatcaatagtaatgattttaacattgttctaagtgaatacttagagtgaactgggtgtgttaatcaccttctttgtctggttttaaaatttatgtaaaggctagtgagtgatttagtattgaaagctgagatgtgagtaaagaattcctctctgtattytaagtcatgcctcagtgcatgcaaggttgggtgattttctaatttccagacctctctgttggttctctaagtacttattgattccttttctaagaattattgtacttagggagtataaaacctactctccaaagggaaggctaaattttcagggtaggaggcacctgggggaatatccaagtctcttcatttatgtttaccagtatggctgttcacaacattagttgctaaattagctagcctttattaattactttccccaaatctctataaacaaggctccagaattcatggctatatgagggtggtaaagctgctaaaatgtctgcaggcatcttcatcaacatctgagtagtttcttctttcaagaatgctttaatagaagaagaaactatggtagacaatcatgtgcaaataaacacaatttcacaaataaacctagacatgcctgtcacaggttgggtttcttgggaagcagactcagagtttagtgtgcaggacaggcaggatgcttattagcatgtgcccttgaaatcaacaactgtggaaaggaagggaaggaagcaggagtaagagggagaagctgagttgcgatgcagacccaacaacagccttggctgatcttatggaaagttctggatctgagatgtccattcatctgtctggagttgggcagaggagggtcaggttttcataccctcctgtcaatcagccattgaatgtgggttgccccraaagggtgtgtgaccttgggtgyggctgctctctgcagcagaggcagtgcccaaagggggctgacagctgaaagccgtcttctggcagcactcccagcagctgggggaataagtcctttattcatgattattcctggagggggatctcgggagcataccacagcgttcaccacaatgcttcagtgaaaagtgataaaaatcaactcataatcaatgctaagaacttgggaaaatgagaaggatagaggaaggtgaggataattacagtgtttgaactgacaagacttccatatggagggtcttggaggtgaggctgggctagagttttgaggagctgacacattgtgatgaagaagcccaggaggggacaagagaggaggtgttcaagggtgaaaggctgtgatggcagaaaagggcaagatgtgtacagggatgacaataagattggctttcctgcagcaagatgttgagaagaattaaaagagacagaagcagaggatggaggtggggagccttgatgctcttaatcagctttgacttaagaaacaagtagtaaacatcagaggcttcagagaaaacagttcttgctgctgtgtacagaataggttggagagtgagggtagaggcagggaggctgcctgtgggaatctgggataccttggggagctttagctgttcccatgatgtctcctcacccagagtaggaactaggctgagcaagcgaggcacctagggtgcagaatttgtgcatgcatgaccctgagaatgtgtgtttctttacattttttctagcgcctccttaaatgttttgccctaggcacctcgcttgcctctccagagtctgactctgccctcaccaaaccatcccggacaaatatataatcttagcaaaaacaatgtatttgttctgtcaatgcctttcaaaacaagcaccctgccctcaaaaggcttgctggggaatgcaaaagaatgagaggtgtgtaatgggggagggggagctgttagtatttagctgggatggtcagggaaggtttttctgaggaggggacatttcaactgagacctgaaaaagttatccacatggaatgggtggaagaaagaatttcagacaagaaaggatagcatgtgcaaagatagacaaacatgcattcatttgcacacttctgaatataatcctcttaagccattatggaaaccggaagaggtgcttccaagagttagaaagcaccatgccttatgtttgcctttatgattaaagaagtcngagatagtgaaagctggggcaattggttgtctctttaaattccaaaaggcactattgagttttggaattctagatgtaaaaatcatattctactgaacatggkgggaccacatcttgaaaaagggaaggagacgcgatattgaaaagaaaataatatatatttaagaaaacatgtataataaaattacctaaataagatttaaattcttcctcctttagggttatgagccggatgctagtgtaaccaagttggcagagcartatgccaaagaggtatgctctttacatgtaaagctattattgccttttactgtcccatgaagttatttaaccagcgtgyttatgtatgctagaatggtaycaagcwgttgctgacaaatgatccaytggaagcagcgcmtggaggcaatgtattaattamarrcryttkgatamgcayggrayragaagaggagaagaaaaagcggctccaggctttccaaggttaccaggttacaatgaakgtacaaattgatgcctctctgaaggttcattaatkccattcatgaaggccagaaccatctaatcacttattcactttagggggagcagactgtcctttcattccctataaaaggactcactgactgtatcccctagggacttctctccttccaaagattagctgtgtcctttggaaaggcatttttgtgctggatgaaggaatttgaaacccactgagaagagaggagcaggcttttccctctcacaagaatcgaggcattgcagtgttttactctttgtgtgtttagagaaattaggttacttctgatgcatgcagtttcttatgatttctcccctaagaaaagccccttaactatgctcctcaggctagtccttgcctctattttccaaggacctctaaatccagtttagttttgctaatgccctccagggcattcccaggggactcatctgtttggctgtcttgcagtaagatctggaacaatgcttctcagtcttgagcaggtattagcatcaccagaggagttgttaatacacagctggctgggtcccacccccagggtttctgattcagtaggtcagggtgaaacctgagaatctgcatttctaccaagttcccaggtgatgcagtgctgctgcctccagggccacactttgagaagcaatgttctggaggaataccctgaaagccaaatgcacaggggttttgtcagcaaagcaacaaatctactttggtggagaaagggattaagcaagtacaattaatattatattgataaagtaatacataaatacaagttctttattgttatatataaaatagaacagaagtttgaaaaataaaaagtaaaaatgtctttctcccatctctttaacagagactattcctagaggtagcctctgtttaataatttgatgtgtctctttgcagaccttttctgtgcatttacatatgtatgcctcaatacacacataactattgatttttttgtaaatgatattttagacattacttatttatttattattattcttactttttccacttaacaaatcttagattttcttgctcactcatttagatattttttattctttttagttgctgcatagaattccaaaggataagtggaaccataatttacttaaaatgtttcctattgataaattaggctatttctgagaatgccgattacaaaaatgctgcaatgaacttgcttatccatatttctttgtgcaaatattactggagaataagatcctgaggagaggaattttggggtgaagtggtataaattttttaaaatatgagagtgctgctaaattgcttacccaaagaagattaaaaatgtatactgctgcagctgtatattatagttatttttccatatcctctccatgtttagcttttatttacatttttaatttttctaaatctggaggaaaaatggcacctcatctttgttaaaatttgcaattccttgattactaatgaagttaagcatctttttatgtttattgggcattgcccttttttctataaattgctattacattttttgcccattttctatttttttgccttttctattattggttataggagctctttatatattatggctaatcccttatcatgtggaatatattttcatggagatattttaaattatataaattgcttcatacttacacttgcttggccaatcttatatgtgttgctggtgctggaactgtaggattgaagaacagtcattttgttgatgtatggcatttataaatgttacttttttccatgtaattttgctggtattttagaaactcaaaatgtcctgaacctagagcttgggtgggaggtaaaacaaaattgtagtacaaaggcagtaattttgaggtaagaaagtatgaaggaatgtagttttgaatctgtatgtgaacaatagaaatatatagggaaatgtaactttcagcaattaactgttggagaaaattaaaactgctagtacatttgcattaagaatgaaaaatctaatgcatagtgcttataatcctgtttaattcacccctacctcattacctttatctaaattgttttaactagtgatggagtatgcttcaagtgctaaaaataataatttggagatcagctccaaatataatattatcacaccaaagcaactttttaaatatagtggactataattggtgacttttgctatcagccacatattacattagtagagttctttactgaaaggtctactgttccactaaatagaataacagaaaactgagttactggtgtaacttgaagtggtactctcttaaatttaaaaagaaaaaaaaaaaaaaaagacttgccagacacggtggctcatgcctgtaatcccagcactttgagaggcgaggcgggcggatcatttgaggtcaggagtttaaaaccagcctggccaatatggtgaaatcccgtctctactaaaaatacaaaaattcactgggcatggtggcacatgcctgtagtcccagctactcaggaagctgaggcaggagaattgcttgagctctggaggcggaggttgcagtcagccgagattttgccactgcactccagcctgggtgacagagcgagactctgtctcaaaaaaaaaaaaaaatttgaaagtaccatgtacatttctcctaggtgtcttgagataaaaccatcactctgctcctttgtctctccctttgcattgatgtctgactactggccatgtgtgtttttagatactgaagaaaacaaatatgactgccacatataatagtcaaaaagtggtcttatccccatctctttagactgctaaagttgctgcctctgactggacatttttacasbrcttkcmcagaaagccagaakaagtggatgatgaagdctyttattytcctykatmactagtgttcccagaggcagaaaacagaaagtggacaatcatggtaagcaagaaacaaggaatggaggataagttctttgtgtggttccaacttggtcattcatgcctttggggaaataataagcaagtgagattatccaactacattacttgctcatgtaacatctattttttttccagaaactttataatacatcattagtgcttattagcatttatagtgtatttgcatggagtgagattaatctcctttcaaataaatccattttaaccaaaattcttaccacccttgatccgcctgagcaccagccaccagtttgccaaccattataagtcatataattcttattttagaatctctttgttcatgtttagagaagcccctaattcagttcctgtataaaatgggcattcaaaacatcttactttttcccttctctttttcctcattccatgccttactttatgactggactagatacttgttttcgttctttgagtttggccatagggatatatgtgtttttaggtatagaacatttccaaatttcatggcaaaacttatcttaaaaattaatggttcctttcagataaagccactagtttcatcttcatcactgtcattctaggaaatattaaccatatgtctactttacaatatcccaaatgtcacctgctctggaaaatagtactgacatgtctaacttagctccaccatttttttagcttttagtgacttaactggtctcaattactgtatcagccaggatcttacttgcaaacgggagtccactctaggtagataaatggaaagtaatgtattaagagacattaagcggctcccagaatcttttgggaaaggaagtgcagtgaataattcttggacaccatatagccagggacaacacaggcagaaaaattgcccaatgacactgtggttcttttgtagccagaacaccactgacacagcctggtacctgaggcycttgaaaccagatgtcagatactccattatagccaccacagctgaaatagatttctctacctgcatatgtagcagaagatccaatctctccgaagacggcttccactgcatgttgtttgcttctgcacccaagtctggagtagatgcagctgagtgggatgcctgtaccctagctgcaagggagtttgggaaaggcagtttttagctttcagcctctggagtagagaaaagcaagctggaaaggactagcttctaattatttatctaatctataaattggaataggtttattgtgaacattaaagtaatatgtgtaaagcttttagtatagtacataacacataacacatggtaaatattgttatcataattattaccctcattatcatcatcttcactattgatctgatacagaccctataaaataagcaggggttcaagctcaactatggctgcttggcagccaaccgtgactcccttttcaatagaagtttgtatattaggcctaaatttgtcatatctaataacagggatgattttttttcactgcatctttccagcttgccacctcaggacactaactttggccaaaatgtcaattgccttgttatctaggccagtacttctgaagccttaatgtgcatttaaattacctagggggtcttgttaaggtgcagatttgaattctgtaggtctaagatggagcttgagatttggcacatctattttttttttttgtttttttttgagatagagtctcgctctgttgcccaggctggagtgcagtggtgtgatctcggctcactgcaacctctgcctcccgggttcaagcaattttgctacctcagcctcacaagtagctgggattacaggcaggtgacaccatgcatagctaatttttgtatttttagtggcgggtaggggggtttcatcatgttgcccaggctggtctcgaactcctgamctcaaatgatccacccacctcagcctcgaaaagcactgggattacaggcgtgagccaccgtgccaggccggcacttctaataaggacccagttaatgcaggtgccaccatcctgcagaccacattttgagtagcaaagatctagatgacaaagaaaatgtgagctctccaaccacatacctcaggaagagacacagcaaaacattttccttgagctctgtttttcatcagaagacaattgaagttacaaagatatatcaagtaaatccatcaaagtagatcctttgtagaaattcagtagggaaaactaaaaggaaactttccaaaacatcaattatggagatgctctgaacttcttatcttttaaagagcttattaaacaacgtctttaaaaccaatttacttgaaaaattaaatacgtaatgtattcacatggttgaaatatttatggtgaaatcttacatccacccatttttccatccatctagatcttaccgccatctccccattccccatacccctgagttacccactattattagaggaaaatattttaaagaaaccaagagacagaatcgtgttaaaatgaaagtagagagtctaaagtagaaagaatgctcacctgggagtgatgagacttgacttctgtaactggccttaatactagtcagctgtgccatcttagcgtctaagtattaactctctaggtcccagtgtcctctcccatgaaataagcagattgagccatagagatggcaaatgagttttaattcttagatccctaatctcatcaacaggctacaggaattctgttgagaaggattttgagcctgcctatggtgtgagacagaaagagtggcataactgattagcgtgccttacacggacgctagaaaggaggtggtgatacatgtgttgcgctctttatgtctctgagctagatgatttggaggtccctttgagttcagttcatttcagcagccatatagtgagcatctactctatgccaggtcctctgccaggcattggagattgaaaaaaagagaatagtatgcagccaccacacagcctgtacagttcatagaagcataacattttcaagtgggatgagaccttagagactatccacgctaaattcctattctataggcaaataaattattattattattttattattatttttattttttgagacagagtctcgctctgtcacccaggttggagtacaatggcacgatctcggctcactgcaacctccgcctcctgggttcaagtgattctcctgcctcagcctcccaagtagctgggattacaggtgcccgccactgtgccyggctaatttttgtatttttagtagaggcagggcttcaccatattggccaggctggtctcgaactcctgacctcaggagatccacctgcctcggcctcccaaagtgctgggattataggtgtgagccaccacagccggccgcaaataaattattcttatacagcttatttagaatggcctttaggttcagcactgccgtgatacatttttctaagatgttctaatacttgtcttcctccagactaccctatccaatacagtagccagtaggcacatatggctttttaaatttaaatctaagctaattaaaattttacaaaattgaagattcaggccaggcgcactggctcatgcctataatcccagcactttgggaggctgagacagggggattacttgaggtcaggagtttgagaccagcctggccaacatggtaaaactctgtctctactaaaaatacaaaaatattagcctggcatggtggcgcacatctgtaatcccagctactcaggaggctgaggcaggagaattgcttgaacctgggaggcagaggttgcagtgagccaagatcgtgccactgcactccagcctgggcgacagagcaagactccgtctcaaaacaaacaaacaagcaaacaaacaaaaaaagagaagattcagttcctcagttatactaaccaagttgttgaatgctcaatagccacatgtggctggtggctacactattggtattggacagcacagacatcgaacacttccatcactgccgagagctctattggacagcactactctagggaataatttccacgcatgcaacttgatttaaaatgaggatgaaataagaaaggaaagccacaatgtcgccctccagttctgagatgcctgtaatgactgatgtaaggtatacactaaaataggatgaagggctttttctttaatggtgtagcattttttaaagcagaagtgtcctctttcagcactcagagtagctttttaaggcctccatgctaagagatttccagtagtgctgttcagaacgcttcactaatcgcatcattctcttcatagtgcacaggtctttggacccctttgtttagaaacaaaaatcacacttttcctccccatgaagcttgcttttgtatttttcagtgattaataaggcagtaggactcacaaaaagtagatagatgttttccctctgcctataaattttacactggagctaaaataacctaaagggaccctgaaaaaaagaaaaaatgctgacacttcaaagcactgttatccacatatgactcttaagtccaaaacaccattgcaaatgtaattcacaatattttatagtcatttacttctccccaagttagagttgccagataaaatagaggacacccagttaaatttgaattttggataaacaatgaataatttttagtctaagtatgtctcatgtactatttagaacatacagtaaaatatatatttgttgttatctgaaattcttatttaactgtttgtccgtgtttatttaactgaatctgacaatcctaatccaagttgaatttgtaagtttttatttggaaataaggttgacacaatccatagacaattaaaaacaaagcaaaaatgagaggggctcccaggaacccattaagaagtttacagtgtcttttacctggtagacattcttatgccaaagtttgccctggctaaactagttccttcttgtcattcagacatcaccttaaatgttactgttgagcaagatcttcccacaccacccactcttaagtggttcccaaggctcctttatctcctttttacattttattttctaatggcactacttgatatttttatatttttttgtctgtttgttgcctgtccccctactataatgaaaacttctttatgaaggcagtaaacctgtctgtaacgttctttattatacctagaagtttgcctgacacatactttaaatatggactcaatacatttttgcagcctaaaggcaatatagggaattggttttagaacataagttttggaaatcaggttaaaattctggctctctctgtgatcttgggctcctaatcaacttaggcaagtaccttaacttcactaagaccagtttattcatatgaaaaatgaggataaaaaatasaaccaacctcttaaggttatgaggattcaatgagatcagagtcatgtgagcattgtagtcaggacccagggacaggtaggtgcagatccacctctcaccatcaccactcaggaaacttcctacatctcagtttctcgatctgtattttacatctcttaccatctcatacagtaggaaaggatattaaatggtatgatgtacatacagcactcagcaccgggcctggcatgtgataactttgataagtatattcagttaacacttttgaaatataagacctgcacttttgatataggctaggaacacatgtacagtgtggttgaagtgtaagaacaaggacctgagagaccacaaaactaccttttaagagtagagtcatccagattcacccatgttgtcacaaatgacaggatttccttttttaaggctgaatactattccattggatatatacaccacattttctctatccattcatccattgatggacacttaggttgattccatatcttagctattgtaaataatgctgcagtgaacatggaagtgcagatatccctgcaccagattggtttcagttcctttggatacatactaggaaatgggactgctggatcatatgggagttctagttttagttttttgaggaatctctatatcattttttataaaggctgtactaatttagattcccaccaacaatgcacaggagatccccccctctctgcattcctgtcaacacttatctttcatttttttaaaaataaaagccactctaataggtgtgtrgtgatatctcattgtggtttaatttgcattgccctaatgattaatgatactcagcattttttcatgaacttgatgatttgtatgtcttctttggaaaaatgcctgttcaggtcctttgcccattttttaatcaggttgttttctttctctttagttgtttgagttccttatatattttggatattaatcccttaacagatgtatggtttacaaatattttgtcccattctgtggattgtctcttcactttattaattgtttcttttgctgtgcagaagctttgatgcaatttgatttgtctatgtttgtttctatcacttgtgttttcagggtcatatgtgaacaattacaagactcatgtcatagagcttgatatggtttggctgtgtccccacccaaatctcatattggattgtagctcccataattcccacatgttgtgggagggactggtgggagataattgaatcacaggggcagtttcccccatactgttcttatggtactgaataagtctcacgagatctgatggttttataagggaaaagccctgttgcttggttctcattctctctcttgcctgccaccatgtgaggcatgccttttgccttktgcaatgattgtgaggcctccctagccattggaactgtgagtccattaaacctctttttctttataaatttcccagtctcgggtatgtctttatyagcagcgtgaaaaaggactaagacagagctttttccctatgttttcttttagtagtgttacagcttcagagcttatatttaagtctttaatccattttgagttgatttttatatggtgtgagacaagggtccaattttatttttctgcatgtggatatccagttttctcaacaccatttgctgaagagactgtcctttccccattatgtgttcttggcacctctgtcaaaaagcaattgaccataaatgcatgggttcatttctgggctttccttactgttttgttggttaatgtgtctgtttttatgacagtaccgtgtggtttttattaaaatgtctttataatatgttttaaaatcaaggagtgtgatgctgccagctttcttccttttgttcaagattgctttatctatgtgggttctttgtggttccctacaaacttaaggattgtatttttgatttatgtgaaaaatgacattggaattttgataggggttgcattgaatctgtagatcactttgggtggtgtggacatttttacattaattctttcaatccatgaacatgggatatcattccatttatttgtgtcttctttattttctttcatcagtgttttatagttttcagtaaacaggtcttttaccttcttgatacaatttatacctaagtaattttttgttgctgttgcaaatgtgattattttcttaattttcttttcagatagttcattattagtatattagaaatgytactgatttatgtatgtcgatttcattttctgcaattttactgaattcccttaccagttctaacagttttttggtggacattatgctaagtaaaataacccaggcacagaaagacaaatactacatgatctcacttatatgtggactctaaaaaagttgaactcatagaagtagagagtagaatgatgattaccagaggatgggggatgggaaggaaggcaatggggagttgttgatcaaagggtacaaagtttcaggtagacagggagaataggttttgagatctattatacagcagaatgattatagtcaataataatatatatctcaaaataacttagagaagaaatgtcaaatgtctctccataaaaaagataggtaagtaaggtgatggatatgttcattagcttgatttaatcattgcacattgtatacatatatcaaaacatcatgctgtactccataaatgtatacaattataatttatcaatcaaaaataataatttttaaaaagagtagagtcagagaaaaccagggttccaacccagttctgcactatctgtcatctcaaggattgatttcctcaactataaatgataataataaaagctaccttagaattttgttgtattaaatgagataatgcatgaacattttcctctagctcaccaaagctcctggcacagtgcttgaaaaatatttcttgaccaatacatgatatggtacttagtattctatctaatacctagtaagcactcagttaacattcaccatagtttctgatattattattgtcattcttgtggagattgagaaaagtaaaagtgaaaattaccatttgtgattgacagatcaaggggaagcggtatactcttggctatagagataatactctttcaggaatacccagcttcagagagcagacattgctcagattactctacatctgattcatcctaaacttctctaggctgcgagagatcaaaccacggtataaacacaaggatctggaataggagagatgatatttctctaaaactagccaatactatacttatgactggaaaattcagtcgtggctaccactgtagcatctcatttcaactctgtgacccactagtcctggaatgaggcctaattatgcagtgtttgtgtgtctagatcagtctgatctctgttgactttcatttataccctcctccaataaataaataaatattagttcagaactgttctcttaccattttcttgagaaaacacattttaactgtaaccctgcaaagctgaaacctaattcacyttctctaggtccctaagcagactgtcgctaatgtttatccatttctttctttctttgttgtgtcatcaggctgtcatggtgtccctgctgacagattactcacctcagctccagaagcctaaatkttgatgttgtgttacttgtcaagaaagaagcaatgttcttcagtaacagaatgagttggtttatggggaaaagagaagagaatctaaaaaataaacaaatccctaacacgtggtatgggtgaaccgtatgatatgctttgccattgtgaaactttccttaagcctttaatttaagtgctgatgcactgtaatacgtgcttaactttgyttaaactctctaattcccaatttctgagttacatttagatatcatattaattatcatatacatttacttcaacataaaatactgtgttcataatgtataatgtctaagccattaagtgtaatctatgcttattacctaaataaattatcacccatgctaatttataagtaaacatttaccaggcagtcagctactggtaaatctgtgggctgtgttcctgtcccccaggaccaactagaaagccaaatgattcatcttgcagatgtggtacaattttcaggccaatgaggtagacaggcattcatttatggaggcaaataacgaaattcttaaaatatagctattactgtgcccaaactccgaagttttttccaataacttgtgagaatgtggtagtggggaatcctccaagagcatgtatctcttctctgtaatgagtacttactgttacaagccataagaagcttttgttagcaagtggtaaaaccatggatacctagagtagcattttcttaggttcaaattctccaacaagaataatttaatttttttcacatctgtgcttatcatgcatctactcacaccatatgctgaatatttccataaatctactacttgcaacattttagccaatctttttcctctaatttttctttggggtaataaaaatttacattattgaattattataatgtaattacaactagatttctcttgcgggtgactaacatttgtattgttgaattattatgatataatttgaattttttagttaaaatgttaaataacataagtgaagtttttttaaaaaattatacattttacagaagacaaaataatgtaatttcctttacattctacatttactattagaaaaatgtttccaggctggttgactgatattcttcagcacacagctctgacttaaatgagtaagcaagggatgaattacaaattagatttgcaatgaaggtgcaataaaacattttttgtgggggaaagaggctcataatgttacagaaaaaaacatcaaattttccagtaaatgtcaaaggtgacttttgtgtccatagtaatttattggaagcacttagaaagagagtggagtttagtggaatatctttcagcagagagtagaacaaggtgtcatatggattgtggaaggctcaccctcaaattgcctacatagaaagaagtgttcttccacttgccaaatggtctgccatagtaacgagctcccatctcattcctggttattctttgaactaaatggatggtatagtcttcttccctcacttggaaagaacttgtaataattttcttgccaaaatatagtcattttttcctcaaaaagctctatagctttctttattgtgtacatacaatttaacctcattctcagcccaattctgtaggaatgtatttgctttcttaacttttcatcttaatcagacattatttatattgtcaggaaaaaagaaaataggggaggaaaattcacccttaacttttgcaaagctgttttcatctcctctttcttcttaccccttttcctatatagctattacaactccgaagtttaacgaaaattctagaaatgacgcttgcatctttggtgtacataataaatcctgtcacctaatataactagccaaagagctcttttcttccaggatttctccacaataacattgggagtagacaccacaagtgattacactgcaatgatttcaatgtcatcagtttttgtttttgttttcagtgataagtttccaggtactttagaaaagtaattcagtgtctgggctgggcatggtggctcatgcctgtaattctggcactttgggagcccgaggtgggcagatcacccgaggtcaggagttcaagaccaccctggccaacatggtgaaactccccgtctctactaaaaaagtaccaaaattagctgggtgtggtggtgggcacctgtaatcccagctactcgggaggctgaggtgggagaattgcttgaaccccagaggcgaaagctgcagtgagctgagatcacaccactgccctccagcctaggtgacagagcgagactccgtcaaaagaaaaaaaaaattaatgtcagatatttctcattttttcttttctttcttttttttttttttgaaacagggtctcactttgtcacccaggctggagtgcagtggtatgttctcagctcactgcagcctctgcctcccgagttcaaagaattctcctgcctcagcctcccgagtagctgggactacaggcccgcaccaccatgcccagctaatttttgtatttttagtagagacagggtttcaccatgttagccaagctggtctcaaactcctgagctcaagtgatccactcacctcgacctcccaaagtgcttgggattacaggcgtgggccaccataactggcctcaatatcagatatttctatctggatattgtgctaattacttgactttggtaatgtccctgggtagaaagatctccacagagaatcagcatggcaatgccattgtagatctcctatacaagtgaccctagaacctcagttaaaatgtcagaggccccttggtccagtgccaaagttccatagcaagtcttctcatgtgataaagatgagtgaggactgcatatgaaaaaagtattcagaacacattccttttgagcctttttgtcttggaagctctcatcgatgtcttacatggagatgattgaggcatatctgagacatggtaccgctcggcaattttgtagggttgatatcctttgacaaatataaaggacatattaaataacagaaaaccactcaagtcacaatgatcagactcctataaccaagaatgccacatactgccttgcaggttgtggtttgtgtaaaggtctcaggtgaaagaaatgaataaaggttgagacccagtctgcacttcagttaccaagtcttgtgtagccaggaggaaggaaaaccttttttgtatgttgtccatggagagggggcactttttagtatttcatatacccgaataggtgctttgctttaaaccatacaaaggatcagtgtctagtaggggagaccctgccatcaacaacttacatttcagtatcaccttgtacttgagggcaatgagacacatgcaatgcactgatagttttggtgtcttgcctcagtttctgctaggttccttaagatgccatagtgaaaatgatagtgtctgtccattttgtgtggcaaacacgtgacacgaatcattgaaacaagtatttgagaatcaaccctgtagttatttaatattttaaagaaattcttccctaataattattcagaaaaattaaaatcattcattgataaaagaatcatggtcagataaaatggaattgaattccctgacatgtgctaaaacatttcacagtcttattaatgcctcacttatgtccatgacagtagacttagtctctaatacacacttttgtgaaactcatccccagagaaaatgcaagcacgactgccttctggagcaaaatcattaggcaaatgaattttcaaactggaacagagttttaaaaaatccagtctatcccttcatttcacaagagaaaaaaactaggaaataacaacagtgttcctagtatagaaatatattcaatagagagggataattcatgtgttaaatgcccctctgcaaatgatctgggatcctacacatatagctgcttgatttgatttacccataggctgaatggggaacgggaagctggctggtccagggatatggctctataaggccgagggatagagaggaaaattcacaccttaggcagaggtggacactgatatccagagatacaaacagaaacctaaaattacatccatgtagtagatgctggtgatgccccatccagatgcctttcacctgggttcgtccatcccccagctgctgacagggttgcgtgctgatgtctcacagctgcctctttctttgaagtgctgctctcagccaccaggaactactgttagcccaggatgtcagactctcaccctaacctggccactagtagcctacagtcaatgagtgactgatatagggatataaaaacttggctcccttccctccaggcaggaccaggtgtgtgggtgaaatttcagccccagaactccacgtgggtgggatcaggctgaaactagtaaccatttgagaccacgtccttgcttagcttccctccacacacccgmcccacccctctctgacacctcaacctgattcccttctgctgagagtgtgtcctcaataaatcactggcacaagaatccccatctcaggctacgttttagggaataaaatctaagatgatccatgaataagattttttgtgggtctgtactgctcatccttcaggcgtcaaggaggattagagagctaagaggctattagacaaatgtggaagagctcatgttcagcaagcaaaaacttttccagttaccaggatcaaccttttgtagaagacagcagaatattaaaaataacaaatactatttttctgtcacatactcaaattcaaaacaggaaatttattacctgcatggaataggaatgagaccaatttactttccccagagaagaggagatttaagttaactgccacaatatttctgattaatttctgtggcattttagtacccttatagattggcaaccccagtagctgttcagttggtctgctccttgccctagcttcctgaggctgtgttggcatactttagtgcaagagtgtccaatcttttggcttctctgggccacattggaagaattatcttgggccacacataaaatacactaatactaatggtaactgaggagctaacaataaaaaattgcaaaaaaatctcataatgttttaagaaagtttacgaatttgtgttgggctgcattcaaagctgtcctgggccgcatgcagcccatgggccacgggttggacaagcacaagcttgttttcgtggttctccaacttaagtgtgcatcagaatcccctggagggcttgataatacacagattactgggccccacctgcaaagtatctgatttagcagatttgaagtgaggcctaagaatctgtactttaacaagttcttggggatgctgatgctgctggtccagggaccacactgagatcactggtctgagacaattctgaaggcttatatgaagggttttcacccccatatctgtaaaataccactataaagtatgtgacacaacccagattgtctgactattgctctttctttggagtcactgaggcctgagtttcatccttcctctactgtgtaacagttatccaaccctgctcttctgatctgtaaaatgagagtaatgctcatctcatggagttgttgggagaattaaatgcagtgacatatataatagtatttggcttagagcaaatgctcaacaaatattagcccccttttattttttcaattgtttttaacactattttttctttagccctttgtaaaaatttatatcccatcatcagaaagatattgagtggaatatttggtataaaaaaagtacaaggaatgagcttgtcttctgaaattggcagagcccagcagctgacactttatttagtcatttctgtctaggagctggtttgtaaatatgcaactcaggggagtgacttggctcattgccaaatrgaatcatggaagccaacaagtctgaaaatccaatcaaggtgactaaattctgcttagaaaggcatcacaggaatatatatttatgtgaaataaatcaggggcatttagtaattgctggacttgaggtctagctggcaaaagaggaaaaagattaggaaggactcatcaaggtttattatccatctttgtctgagaatagcactgctcaaaagaggaagttttcacactgttcttaaggcagcagttctcaaaagttttggactcagaaactctttatgctcttataaattatgaagatcttaaaaagcttttatttatgtgggatatatcggtataagccacactagaaagtaaaacagaaattttagaaatat

SEQ ID NO: 94205 - DNA, 115112 bp, Homo sapiens
  misc_feature (1)...(115112): n = A,T,C or G
tagatgtacggggtgacttgggagcacatcacaggaggacctcacccagaagcatagaaagtcagggaaaacctcttagaggaagggacttctaaactgagacccaaaaaatgagtgggtgaatgaataggtgaaaaagtgattgaggcagatgaaacaacatatcagaatctgttggagggaagagagagcaccatgcacattggaaactgacaaactgacagacctctggcatgggtgggacgcattgagtgtgaggagaggaagggcaagcagtgacctagaaagattaggaagggctgggccataaaaatgccatataggccatgttaagaagtttgatctttatcctagtgaaataataaggaattaattttcttaatgtaacagatatgagtttcttgagagaatagaaatacaaagaagacaacaaaagtggcttcatattcactttccaagtgacctttttttaaaaacaaaagtaactaatatataaggcttgaaaatctaaacagttcaaaacgaaaaatgaaagtcacgcttcccccaaccaagttactctccccaaggaaaaccaccattaagaatattttgtgttatttccagaagaaatattcattgtcccctcatgtaagtatgtatatatgtgtgtgtgtgtgtgtgtgtgtgtggagatatctatatctctatgtatgaccaatcacaatatgctcactcttttgcaccttgctttttatttaatgacatatattgaaaatattttcatatgtgcattcacacacacacacacacacacacatatacgaaatatttcatcagtttgagtgtcatccttactagagagtcttactaatatcattattattccaactttagtcaataagggaggcattgctgggggattttaagcaataaggatttacaaccacttttgtgttatgggaaaaatagctttgactgttatttgaagaccagattatggggggtcaagagtggagtcataaagaattataaggaggctattacgctggtccaattaaaagattatggtgacttagaccaagtccatggcggtggagatagagagaagtgggtgcattgagaaaaagatgtaaaatataaatatgacaggacatatcaatgaaatggttgtagagagtgagagagaagagagtaatctcagatgacattcaagtctctggcttggtatataggaatgagaatgctaattatgtcatgcagtcgttcaggaggcttattctgaatgatattcacccattgaaaatatcctctccctactctaaaatgttatatcacattgtagagacctctattctcttacttactatgtctatttatagtaatgaaacattttatttgtacattgttttagccttcttacatgctatgtactccttagtagtgtggctggaagtaggcaggtatgaggaaaatagaggaagaaaaaaaaagactaacatttactgatcatttactatgtaacaggtgttacacagggccatttttcagacattgcattttattttcacagcctgattttacaaataacaaaatggaggctcagagcactcaagtgacttccccaagatcatacattttagggagagacagagctaagattcaaaccaagtttgtccatgcccagggcccaccatcaggaagccaaatgagaaagtatagaagagttgggaggaacagctgatgccatgtatagagctgctccaggcaggcaacagagaggaaagcatgttaattgcacagggagaggagaggaagcttcacccaggcaagcagaaagattcttgggcaaagggagtggggaaataggtgttgggaggactctcagggagacgccacatgaatgaggtaccaggaagctgaataaaatatatttttgacctagggccaaagagtgaatactcaaagaccaggtgagtctggagctaaagaatcagtctgcagatgcaagtaagctggtggtggtgggaggttggggggtgagcttcagagcaagcatcccttacagcagtggtcctcaaaccagcagtggtcctcaaaccagcagcagcagcatcccctgggaacttgccagaaatgcaagttcctgggcctcacccaagacttactgaagcaaaaactcaatgccttaacaaatcctataagggattctggtacatgttcaagtttgaggcctacagccttggaggactagggaaagcagcaagtggagttcaagagccagagtacaagaaccaaacagtgtacccagagcaagcctagggctgtcacacatcacagcaatgcagagcaacctttccaaagcataacagagtctgctggtcagaagtggtggtggggagtggcttcagagatgtggtttctgggggacaaccccctcttccctgcacccctccacctttccccagaggtcttctttttaagaaactgctaagggcaagctcatcagaggatcctgaggtaaaggggttagactgtctgtgccaaggcactgcccatggcttttaattttctcctggtacctgatactgtcacaaaatttaactgtggaaaatataggaaggaaaacaacatttactgggggtctgaacatgctgagcactgtgctaagggttcacacaaatgccagctgatttaatcctcacaatatttcagtcatggaagtgttattattcctgttctgcagatgagggaccagaggctcgaaaaagttaagtgatttgcccgaggtcacatagctcagaaaaaggcagccaagatacaatccttagtctttctgactccaaatgccatgcttctcaccctagaccatgttgactctaatgtgaaggtccctggggtcctctcctctttgtagccaccccagggccatgtgttattgatggcccatagatgagtaacctggaaatattggttgaatgaataaacgaaaagatgttctagtgacagagtttaacacatgaaggacccttaaggatattctggtcttacggttttccaatctgtttttagtgtcctagacatttcttactggtgctccagacacaatcacattgtctaggaaaccagtcatacccagtggacaggttcctctgtctcttcacccttgcccatttctatctccttccctgccttacctagaacaaatcactttcatcttccataagtagtgggtgtttactaagattctgtttggggaaagggttctgctgccaaaattaattttgagaaacccaaatctagaccacctttttcatgttataggtgaagaaactgagtgatagaaaggcaaaaagacttgtccagggtcactgtgtgctctttagtagcataactagaatgtgaagccaggattcttgaaacattcttcttttttgacacaagttaatacagtttgtgtcctaacgaggaaataattatttagatttcaacaattatttagaattgaaaaattaaaaattataactctaatttttgcctttactatgttccagttattgtgctaaatagttaatacgtatagccttatttaagttcttataacagtcttataaaataggtaatattattatctccatttgaaaactgaggtttagggggattaaattactttaatcatagaatcaggaaatggcagagttgggatttcagttcagaatatctgatttcagttttcatgctcttaacagtgatgccatattgcaaatgtctatattgaaaaaaaagtctatttagcctgctgcttgttttgtaaattaatttttattggcacaatgatataccttgagagctacaaagacaaatttgtgtagttatggcaaacagaaactgtatgctctggaaataaatgatttagtagctagccctttatagaaaaaatctgccaacctctggtctgtagacaccaactttaaaatgtttttcaagtgacctccaggagaaggaaccagaaatgtaccccggatttgcagaaaaggtgggtgctgtttgtactctcagtgaaattggtgaatgaataatacaaacctggaaacctggcctacctggcctcctgcagtcttcactgtgttgattcaagtctattatgacctgttcttgttgtctttcatgagtcagagcagaggccttatcccttcccctccctgtcataaatgccttagagcttggacttggatctcagcttaatcagttttgtctccacttcccctttcttgcttcaaggttcacatgtgtgmgaggcagataattctaggggctgccatggcttggctaagcttcccttgaccactgagcatttctaagggagttgaggctggtggctcctccttccttcctactggtgcttccacctgccttggtctgagttgcagtccatggggcagcgcctaagtgtctgagcacacttaagaatctctagtggtttatgacccagactttgccctaccacctcagtcttctgaatgttctcttccctggaccctgctccagacactttaaattcagaagaggaaaatgtgcccagcctgcctggagaaaagtgtctgctcctagccaagatctcctcatcacaaagtaagaatatcaggtggtggaacccccatcatacctgtccccttcctatacctgggtctgttgggtagatgcagtcctttttagagaggcatagtattctcagacctgtcgccacaaattgctccccactcattctttccctatactttgtgtctttgaaacctctttatcttctatgtttaatatctagactatactttcttcatggaattctagatgtgtaaatttacagggctgggagggtccatatctagtttaagaccctcattgtagaaatagaaagaggcccagagaagagaagggagtgggccaaatccacaaaatccacatagctgattactcctagagcaagtggggcgagaaccttggtcacttgactcaggacagtgacttttcactcttctctctttccaccaggaatgggaatgacctttgactttaaacaaatccagactccagttttaccctgaattgttgggggaacattttgttttttttttctttttagtattttcaattcttccatgtcttagtttttagggtgttgacctgtgttaatccaggctatcttctagctatatctggtttcctcaggtggaaaatgttaaatatagttaatataaaatttcactctagaatctgctagaaatgacggaggcaaagttaatgtatatataaaaaaatccaccagtgactggtggccagtaggctttcaataattgtgaagtcccttctacccccttgaaagtactgtgtttctcccctaagcagcacattgtgtgtggtggtttcatggttaaaagtttagacagacccagcaaatctctcttctcttttacttcctaagtgtgtgaccttggacaagttaccttccctctcagagctgaattttcctcagttgtaaaatagagagaattagagtattcatctcacaggataattgtgagacttaaataagagaatgcatgtaaaatggttaacatagggcttagaatgtagaaaaaaagtcctttgttttattgccaattttatttttacttatgactaagcagccatgacctcagaataatagtcagggctgacaattgtgcttcagagcaagaaggggaagaggtggtgagatggaggctctttcaatttctacctcatttcttaaatggagctgttgaaatctacccatgagctttggctggccacactgacagtgttctcctctcagcaaagaccaattagcaagtcctgataacagaagtacaacccacccccttgtaattcctcctgagatcctaaccaggatttgtaaaacacccggatatgggtaaagaaccatcccgggttttgtatcaaaccaggccccagaggaacaggacattccagtagttttgtttctggaaaagagggcacccagcccttccccctccctcatcctcccatcccagtaaacyctgccaaattggaatcctggacttaatttaggagaaaggccctgtaaccaagatactgactgaacatggctggcggactcaggctggggtctgcagtgcagcattaatgggccgctgacatgaatatggagtagttttctctagcaaaggtaagctttcttttctctcttttcaaactctacctcacctgccttcctgtgcaaaaacgtttatttagctgggtttaagggagtcctggccactaggagaaaaagtcagtggccaaaaagttggaggaggtttggctgatgtgcaggaaagttaaaggagacaataggctccttttgttcctctcgccaaaatagccaggactacactggcttgtctgtttcagggccaatcctggagccatacagaatagttcattttcctgtcgaaatagcttgctcatcttctgtttcacaggttgaggaatttattgaggtgatggatctgaggattatgtaagtgggaactcagttacttaaaaataaccatgtttggtttcatattttgagaccagattggcacagagtaagccaataaatgatagcttaactaagctaaacatctgaatttgagtagtcttagtttctacatagcaaaaatcttttagaaatcattggttcaaattctggctatttttaacaactggctgcgtgactttgagcaaatccttgcacctctctggtatcagttttttatacatcaaatgagggtgattgaaaaagatggtttctaaaggtttcatgcatgtgtgaatctataacacgttcagtttttcattactcagcatctattatatgacaagcaatccttttgctagggactcaaatatccatggttttatttgggcctcaagacaatcctgtgaaaaaaatatcatcccattttttggatgagatgactaaggctaaaataatttattgaaaggtcacatagctatcacagacaagagataggatttgaatcaaggtctttaacttcaaatcggtatgttttctatcacagagttaagaaagcagaggaccaaaaggtgaattttgatggagggtttattaggaaggctgctgagagattgaagacagggccccaaagatggctcagcattcctttattcagttgagtaatcctttgtttaggatgagcctgtctagcccaaagtagtataactgagaaagggagatggagggagagaaaagagcattgtcgcaataaaggaacagtttgcaaattctagggaacacagcaatgcaaattgttatgaataatagggaccagacccaggtgacactgggatggcaggaaggtaaggtaaaggtaagggaggcttaactttatattggctgatcttctctccaggttggcacaaggtttcagtatatcttaactaaactatccaaatagcctagaatttttctttcttttttccttcctttgagtgcctattccttctgccttcctttttattttgtattttttacttttttccaggattctttctcaacttacttatttcatttctccttttatttcttcctgttctttttcctcatcagtctggttcttctctatgggcttagctgagaaaaaaaatatccttgcccaagtgaaaagcttacacagggctttcacatctttcatattatttgacctttattacaaactaatgaggggcccaaagtagagacaatcctcatttaagacatgaggaaactgaggctcaggaagttagggacttgttcaaggttatataaccaataaatgatgaatccagagctagaacttactattttctggtgcctgaacgctttccactgtaccatgaaatatctaagtggttatattttattttatttatttattttttgagacccgtgtttcactcttgttgcccaggctggagtgcaatggtgcgatttcggctcaccacaacctccgcctcccaggttcaagcgattctcctgcctcagcctcccgagtagctgggattacaggcatgcaccaccatgcccagctaattttttgtatttttaatagagatagggtttctccatattggtcaggctggtcttgaactcccgatctcaggtgatccacccacctcggcctcccaaagtgctggcattacaggcgtgagccactgtgcctggcctaacatctaagtggttataaaggattttatgggtttttcattttttctgctcttttagtatatgataaaaccaaattaaacagcagcaataacaatgacaaattcaaatttgaggaggatagaaaggatgtcaataattagaaggaagaaaaatacttatcaggtgcctactaagtcccagctgctgcaaaaatttatcttatttagatatagagtaaaacagtacttaaacctaagtttgtctgactcaaaagttctagttctttacattataccatgttgtttccaagaagagagttcagcttgggctgtgtgcattttcatacctatgtttatattcctgtatgcttagaatgtgttaccatatatgggaatttatgagtgtgcacatatttattgctattcataaaatggaaaatctttatggccctggcaagtttcatttccaaactatttccttacttgcaatagtaatagccactaataccttttgatcacttacatgtgcccttaaagtacttacagatcttaattaagttaatccccacaaaactctatgaggtagctaatagtattaataccatttgaaaaataaagacactgtggctaaataaatgaagaagtttcccaagtcatacagctaggaaaaatggagccaagattcacttaggtagcctgataccaaagcctgtgccctggatgcaaaatcgagtaagtattccttatctctcaagatcttgagaattatataagatggcagatatgaaaaacacattgtaatctggaaactgctaggggtatgttaggtggcatttcccaccactccccagattctattgtttaagccatttggatcataagtcaccactgttgaatgcttgttcactgtatgctgatggcctgtactagtctctcccaggaatattttcarttttatcatgtgtttctccagttgtggagctcttgcctgggacagttttctgtctaggtaaatgagttcaaggcacaactgctttgttgacacctctctgagaaagaagattgaaaggggtccatgttgcattcagacttggaatgaaccgaggacactccctccctgttgaggattccaaggcatgactatttgtgtgaccatatatagagctatgtgtaggtgtatgtgagtacgcctgtgtttcatcagtgaatgtaagtattggcagcatgtgaaagctggaaggactctttgagagctcattacataccacatttttatggttctgcacttagattatcacacttctgtgactccctcaaaaggtaagaactatatagtccagctttatatagtcaattattttatagatgggaaaaatgaggtgaagaaacttgcctaagttcaccctgaacaagtattagaacttgaaccagacccaactgatggaaaaatgtatacttgtgcttctttatgtcactttaacaatagctgttattgcccatctacttggcctccatcgccatgtcgtaatagatacacagcgacctctaaaaaatgacattctctctcaaggagtgtgtagtccaatctgggaaatgaagacagttcatgaggcaggtcatgagatggaaaggtaacaataatacagagtctgacttaatctaattgggtgctatagacagtaagtagccctgcagaggacagtgatatgaagaggctaaaggtggccttctggagcagttagtattcaaattaacccttggagtaggaatatagaaagtatgatggatgtgagactgtagagatgaattaacaaactgcagccaggagggaaaaggaagaggaaggcaaccagtagttactactgcctactatgttccaaacatggattatacttgtccgtttcatgtaagctttctgatttatttctccagggctgatattattatacccattttacagatgagaaaactggttctgagtggttaagtaatccccaaggctacacagctggtcagtgggagagccaggttttggaaaaaaggaccccaaaacagatcctctcttacatcaagagctttctgccaaatataatatggaatctagggattaacacttgggtcactgctgcgtatggagaggactgagagtttgtgaagtagtctataagtttatttcttaaaaagggtaaatatctggggattttctatccatatgtgaatctgtgcatatatttgattctcaattttttattaacaatgcctatttcatatgcttgggttgaagatttagcgaaataatttatataaagcactggacatggtgctactatgtaatgatctgtcagtgaatagtagccattatcatcattatcattaatataatctattagttatatctctgcctacatgagtatgtatgtctgtttgtaaagtgattataactgcatgtaattgcttgtttcagaatgtatgtgttttttcatagatatggctgttgctataggcatatgtatgttctctgtgtatatacatgtgagtgtgcaagtatatttttgtggaaggtagtacagcatggtgattatgctggagccacacttcctgggctcaaatcccaactctaccgatttttatctagatggccttgggcaaactgctttacacctctcttctgaagtttctccattgtaatatggggataataatggtgtctacttcatagggtggttgtgaggaataaatgatttaatctgtgtaaaacatttggaacagatgtaccatgcacatacgataaatatagctttattattattattctgaagttgactaagattttatataacagagtgattttatgtgtaaatggaagtgtgtgcatctctgcttttaggtaagactacatgtacctgtgtgtgcaagtttatgtatttatgtgatgttgtctgtgtttctgtgtttgactgtaactgtgtatggtatcactgagtgcttcgtcctagtcccaggaagtctaacgtcctgtcttatgcattgaagtgagaggttagaatcttgggtctgattctgactcaggattagacctatgaaatgaatttatgaatagccttgggaatcagcagacaacatttcttctgagaagttcaaaatacttccctcacatactgtcatttatttttggttcattgttaacttttgaagtataatacacataaagtgcacaaatcgtgtttatagctcaatgtattttcacaaactgaacacgcttttacaaccagcatgtagatcacaaaacagagcattacttagaagccctcctcttcccttcccagtcacagaatcctacttcaaggcaaacattatccttacttctaccagcatagattacattggcctgattttgtactgtatttaaatgaaatcatacaatatgtactcttttgtgtctatttttttaaacattacatttgtcataatcattcatattgttgtgtgtagttgtagtttgttcattattattgctataaagaatttcattttatgaataaaatgcaatgtattcattcattatagtgttcacgaacattttgactgtttctattttgggtttatgaatattctagtaaatattttttagtaaattctcacttgttgttaagtacaatttatagaggataggaagtggcaacaacaatgagtgttccccttttgcctatgggaaaagagaggcaaagggagaattagtgttagtggcccaataaggcttctggtgcctgtttcctgattcttgggacagagcacattcttcctgctacaccattgaaaaaactggatccagatctctcttctgaaggaactagtaatacatgattagcagcacgggtgactttttaactatgcccttcaaaatccaatcattgaaaacttattgaattaaaaggaatcaggtaagttaaagaaactgggctaaatgggttttgctttcycagtcactcaacctggctcttgcctcttcagttttctggacacgtagaaagyccctttgttctctttcttctacaccagcagtttttatttgcctgtttcccagagtaatgtgggccatggagtcaggccacctcctctgggctctgctgttcatgcagtccttgtggcctcaactgactgatggagccactcgagtctactacctgggcatccgggatgtgcagtggaactatgctcccaagggaagaaatgtcatcacgaaccagcctctggacagtgacatgtaggtttaatttmttgtggtatttgaggggaagttatgggagcactcttgaggtcaggaagtagcctcttgaggcccctttcccagggtgtggtagcagccagctcctgattgctccgagctgtacatactcagtggcagatttcctgggaagaaggctagttgagtcagaagccagcatttcatctggagtttgccgtaacatttttagagtcctaaagagaattccatatttgctgttttctaatctcatacccacaatgcttacttatttaataacaactgtttgactttaaaaaagaataatgaaatatatacagtgtttgtaagatgtatgggtgggagctatgcttctatagtttggtgaagctactgtatatttatttmagatatgtgaaaatgtgaaaaaagaaagtaagccttagaatcaaggaattaatggtaataattctcacttatgtaatactctgtgacacagaccatactagaaatttacatactttgtctcaactctcacaaaaactctagaaggtaagtatgtgtgtagttattttatagatgagaaaactgaggctcagagaggtcaagtgacttatccaagtcctataactagtaaatgaaaaagataggatttgaacctcgataatgagaatgtaaactaatactcttctcaccactctgtccctcatagatcccacaggattaacctttcctgatcttagaaaatagcaagtgctccacaaatatctgttaaagaataaatgaatgtacgaaaaactattttgtgaccatgactcatttttttctctccaaagctttggagttttccaaagttgattgtaatatctctgagttctctgagaagaattagagtatagtaggaataacaactctgtcttttttgacacaaaatattcatctagtttcagagtcagagtccttgtattaatttttttgagggaataaattcattatccttcatccctaatactttgtagtaatattccacatttattgaacttttactatttgccactgtcctaagctcttcgtgtatttgaattttttttttttagtcaccagtaaaagctgtctgagttaggaactatgattatttccattccattttacagatgggcaaattgtgttcagagaagttaagtaacttgttcaacatcccactaatttggaagtggcagagtcagcaatcaatccaagtggcttggctccaaagcttggagttataagcactatgccctaaggcctcccatatgtatcagaatgatgctaagtcaggctacattgacgaggagtcgatcacttaaggagtcagtccacagttggttgtctctttgttactgcatattgtgtcaagctatgtgaaattgccttttatgtgggtttaaagtggtcaaatatgagcaatttcatatgctgatatttgaaatttttaatagttaaatctaaaactttcatgttttgatcagtacaatgccatttcctcttgttttgtcctaaacaaagatagtcactttttggtcagtatcctctggaaaaggaacctctcaaggcttgaagatggggggcaaaattatgactctytttcttctttcccagagtggcttccagcttcttaaagtctgacaagaaccggatagggggaacctacaagaagaccatctataaagaatacaaggatgactcatacacagatgaagtggcccagcctgcctggttgggcttcctggggccagtgttgcaggctgaagtgggggatgtcattcttattcacctgaagaattttgccactcgtccctataccatccaccctcatggtgtcttctacgagaaggactctgaaggtaaaccattccaccgtttctttcccccatgcccaacaaatatcacttttcctttattgccaggtgaaggagaagaactggtagtgaagattttcttttcttcctatttatctgaggtggcaaagactctcctcagagtaaacaagggtgggcactggtatcagttctgccattcatatactgtgtgacttggacgagtcattgtctctctctgggtctcagattccttctcagaaatgtgaagacacagtctacctcttaacacaaggaactatttgaatggcatctccatagaatatttgaatattctatgaaaagaaaagagaatgctataaatgtgaaggattgtcatcctagtgtcacagtcttctgaaagttccattttgtttttccctaaaggggagttcagcttatttatctctatctcccttattcctggcccagtaatttataatactgacaacagtgagtaagaggaatagaaagggaagtcagaagactctggctgggccactaaatccctgtatgatcctggacaagttacttttccttagttttctcttccatacaatggagaagtgaaccaattaatcattaagttgactgcagactgaaattctgtgattgcctgcttttttattttaagtgagtgtttgaagggagggaattctgtcttcttgcttctatgccaccagctttatgctatggcattaccagatcaggccaagctgtacttttcctagccacagaacttttccagtggctacaagctttccacccattgttaatgtgaggactggattttttaggttaaatgttacctaaatctgtgctctccttaggttgtgaggaatactatgtaggtcattagcatgctacattttataagactggacctagggttctacatgtcagctctgtcttaatttatgtatttgccacggtccctcacttattctgggcctgtgcatgtacaatttcatttctaggttccctatacccagatggctcctctgggccactgaaagctgatgactctgttcccccggggggcagccatatctacaactggaccattccagaaggccatgcacccaccgatgctgacccagcgtgcctcacctggatctaccattctcatgtagatgctccacgagacattgcaactggcctaattgggcctctcatcacctgtaaaagaggtacaggtcccaaggataagctatgaggtgtagtttgggacatctaggggtagcagtgatatggttgaaccacctacatattggacagcagcctgaggagtgctaattcagcactcttgtttattagcaagaaaaatctctgctaaactcactttgcactatttttttttttgcaatttcattactttttttctttgtttgtgggttaggaacaatttttttttcaataggttattgtggtacaggtggtatttggttacatgaataagttstttagcggtgatttgtgagattttggtgcacctatctcctgagcactatacactacaccctgtttgtagtcttttatccctcgtgcccccccagccttttccccaaatccccaaagtccattgtatcattcttattcttttgcaccctcacagtttagcttccacatgtcagtgagaacatacaatgtttagttttccattcctgagttacttcacttagaataatagtctccaatctcattcaggtcgctgcagatgccgttaattcattcctttttattgctgagtagtagtccatcgtatatatgtaccacggtttcttgattcacttgttgattgatgggtatgtgagttggttccatgattttgcaattgtgaattgtgccactataaacatgcatgtgcaagtatcttttttgtataatgacttcttttcctctgggtagatgcccaatagtgggattgctggatcaaatggtaattctacttttaattcattaagcaatctccacactgttttccttgtggctctactagtttacattcccaccaacagtgtaaaagtagctgttccctgttcaccacatccaagccaacatctactgttttttgatttttttttgattatggtcattcttgcaagagtaaggtagtagcgcattgtggttttgacttgcatttccctaatcattagtgatgttgaggattttttcatatgtttgttggccatttgtatatcttcttgtgagaattgtctattcatgttcttagcccactttttgatgggattgtttatttttttattgttgatttgtttgagttcattgtagattctggatgttagtcctttgtcagacgtatggattgtgaagattttttcccactctatgggttgtctgtttactctgttgactgttcctgttggcgtgcaaaaactctttagtttaattaagtcccaastgtttgttttgattgcatttgcctttgggttcttggtcatgaaatccttgcctaagccaatgtctacaagggtttatctaatgttttcttctagaatttttatagtttcaggttttagatttaagtccttaattcatcttcatttgatttttgtataaggtgagcgttaaggatccagtttctcttacatgtggctagccaattatctcagtaccatttgtcgaaaatggtgtcctttctacactttatgtttttgtttgatttgtcaaagatcagttggctgtaagtgtttgggtttatttctgagttctctattctgttccactggtccaagtgcctatttttataccagtaccatgctgttttggtgaaatggcattatagtatagtttgaaatcaggtagtgtgatgcctccagatttgttttttttgcttagtcttgctttggctatgcaggcgcttttttggttccatctgaattttagaattgttttttccaattctgtgaagaatgatggtggtattttgatgggaattgcattgaatttgtagattgcttttggcagtgtggttattttcacaatattgatcctacccatccatgagcaggagatgtgtttccatttgtttgtgtcatccatgatttttttctgcagtgttttgtagttctccttgtagaggtctttcacctcctcagttaggtatattcctaagtatgtatgtatgtatttattttttcagctattgtaaaaggggttgagttcttgatttgattccctgcttggtcaatggtagtgtatagaagagctactgattttgtacattaatcttatatccagaaactttactgaattcttttatcagttctagaagctttctggaggagtctttagggttttcaaggtaaactatcatattgtcagcaaacagtgacagtttgacttcctctttacatatttagaggccctttatttctttctcttgtctgattgctctggctagcatttccagtactaagttgaagaggagtggtgagagtgggcatccttgtcttattccagttctcaaagggaatgctttcaacttttccacattcagtataatgttggctgtgggtttgtcatatatggcttttattacattggagtatgtcccttgtataccaattttgctgagagttttaatcataatgtaatgttggattttgttgaatgcattttctgcatctattgtgatgatcatgtaattttttaaaaattctgttcatgtggtgcatcacacatattgacttgcatatgttaaaccatccttgcattcctttcatatgcatcaagtgagtatgaaacccacttgatcacagtggatcatctttttgttatgttgttggattccattagcttgtattttgctaaggattttaggacctatgttcatcagggatattggtctgtagttttcctttttttctttttattattatcatactttaagttttagggtacatgtgcacaatgtacaggtttgttacatatgtatacatgtgccatgttggtgcgctgcacccattacctcatcatttagcattaggtatatctcctaatgctatccctcccccctctccccaccccacaacagtccctggtgtgtgatgttcccattcctgtgtccatgtgttctcattgttcaattcccacctatgattgagaacatgcggtgtttggtttttttgtccttgtgatagtttgctgagaatgatggtttccagcttcatccatgtccctacaaaggacatgaactcatcattttttatggctgcgtagtattccatggtgtatatgtgacctaggcaataccattcaggacataggcatgggcaaggacttcatgtctaaaacaccaaaagcaatggcaacaaaagccaaaattgacaaatgggatctaattaaactaaagagcttctgcacagcaaaagaaactaccatcagagtgaacaggcaacctacagaatggaagaaaatttttgcaacctactcatctgacgaagggctaatatccagaatctacaatgaactcaaacaaatttacaagaaaaaaacaaacaaccccatcaaaaagtgggcgaaggatatgaacagatggtctgtagttttcttttctggttatgttctttcctggttttggtattagggtgatgctggcttcatagaatgaattaaggagggtttcctctttctctctcttgtgaaatagtgtcaaaaggattggtaccaattcttctttgaatgtctggtaggattccatggtgaatccatctagtcctgacttttttggttggtaatttttttaactgccattttaatcttgctgcctgttactggtgtattcaaggtacctaattcttcctggtttaatctaggaggattgtatttttacaggaatttatccatctcatttaggtttctagtttatgtgcagaaaggtgttcatagtagccttgaatcttttgtatttctgtggtgtcagttgtaatatcttaacgtttcatttcttaatgaggtcatttggattttccctcttcttttcttggttaatcttgctaatgatctatcaattttatttatttttttcaaagaaccagctttttgtttcatttatcttgtagtttttttgtttcaatttcatttagtttttctcttgatattggttatttcctttcatctctagggtttgggtttggtttgttcttgtttctctagttccttgaggtgtgaccttagaatgtcagtttgcactctttcaatctttttgatgtaggcgtttagagctatgaacttcccttttagcaccacttttgctgtatcccagaggtttggtttttataggttgtgttattattgtcaatcagattgaagaattttttttttattatactttaagttctagggtacatgtgcacaacgtgcaggtttgttacatatgtatacatgtgccatgttggtgtgctgcacccattaacttgtcatttacattaggtatatctcctaatgctatccctcccacatccccccaccccatgacaggccccagtgtgtgatgttccctttcctgtgtccaagtgttctcattgttcaattcccacctatgagtgagaacatgcagtgtttggttttttgtccttgcaatagtttgctaagaatgatggtttccagcttcatctatgtccctacaaaggacatgaactcatccttttttatggctgcatagtattccatggtgtatatgtgccacattttcttaatccagtctatcactgatggacatttaggttggttccaagtctttgctattgtgaataatgccgcaataaacatgcgtgtgcatgtgtctttatagcagcatgatttataatcctttgggtatatacccagtaatgggatggctgggtcaaatggcatttctagttctagatccttgaggaatcaccacactgtcttccacaatggatgaactagtttgtagtcccaccaacagtgtaagagtgttcctatttctccacatcctctccagcacctgttgtttcctgactttttaatgattgccattctaactggtgtgggatggtatctcattgtggttttgatttgcatttctctgatggccagtgatgatgagcattttttcatgtgtcttttggctgcataaatgtcttcttttgagaagtgtctgttcatatccttcgcccactttttgatggggttgtttatttttttcttgtaaatttgtttgaattatttgtagattctggatattatccctttgtcagatgagtagattgcaaaaattttttcccattctgtaggttgcatgttcactctggtggtagtttcttttgctgtgtagaagctctttagtttagttacatcccatttgccaattttggcttttgttaccattgcttttggtgttttagacatgaagtccttgcccatgcctatgtcctaaatggtattgcctaggttttcttctagggtttttatggttttagatctaacatttaagtctttaattcatcttgaattaatttttgtataaggtgtaaggaagggatccagtttcagctttctacatatggctagccagttttcccagcaccatttattaaacagggaatcctttcgccatttcttgtttttgtcaggtttgtcaaagatcagatggttgtagatatgtggtattatttctgagggctctgttgtttttcattggtctatatctctgttttggtaccagtaccatgctgttttggttactgtagccttgtagtgtagtttgaagtcaggtagcgtcatgcctccagctttgttctttttgcttaggattgacttggcaatgcgggctcttttttggttccttatgaactttatagtagttttttccaattctgtgaagaaagtcattggtaccttgatggagatgacattgaatctataaattaccttgggcagtattggatgaaatattctgtatgtatctgttaagcctatttgttccaaggtatagtttaaatccactgtttctttgttgactttctgtcttggtgacctgtctagtgctgtcagtggagtattgaagtctcccactattattgtgtttctcccactattattgtgtttctatctatggcatttcttaggtctattagtaattgttttataaatttgggagctccagtgttaggtgcatatatgtttaggattgtaatatttttctgttgaacaaggccttttatcataatataatggccctctttgtctcttttaactgttgttgctttcatgtctgttttgtctgatataagaatagcttctcctactcacttttggtttccttttgcacgaaatgcctatttccaccccttgactttaagtttatgtgagtccttatgtgttaggtgagtctcctgaagcaggagatggttggtgacttcttttccattctgcatttttgtattttttaagtggggcatttaggccatttacattcaatgttagtattgagatatgaggtaccatagcattcatcatgctatttgttgcctgtgtaccttgttttttttttatttttttgtttttgcttttcaaattttatttttgtttcatagatcctgtgtgattgatttatgccttcaagaggttccatttttatgtatttcctggatttgtttcaagatttagagctccttttagcagttcttgtagtggtggcttggtagtggcaaattctctcagcgtatgtttgtctgaaaatgactgcatctttccttcatatatgatgcttagttttgctggatacagaattctcggctgataattgttttgtttgtggaagctgaagatagggccccaatcccttctagcttgtagagtttctgctgagaaatatgctgtttatctgataggttttcctttataggtgacctggtgtttttgtctcacagctcttaagattctttccttctttgtcttaactttagataacctgatggcaatgtacctaggtgataatctttttgtaatgaatttcccaggtgttcttttttttttttttcacagctgtattttttttttcagtcattatttgtttgtacagctgtgtgaattttttttttttttttaattatactctaagttttagggtacatgtgcacattgtgcaggttagttacatatgtatacatgtgccatgctggtgcgctgcacccactaacgtgtcatctagcattaggtatatctcccaatgctatccctcccccctcccccgaccccaccacagtccccagagtgtgatattccccttcctgtgtccatgtgatctcattgttcaattcccacctatgagtgagaatatgcggtatttggtttttttgttcttgcgatagtttactgagaatgatggtttccagtttcatccatgtccctacaaaggacatgaactcatcattttttatggctgcatagtattccatggtgtatatgtgccacattttcttaatccagtctatcattgttggacatttgggttggttccaagtctttgctattgtgaatagtgccgcaataaacatatgtgtgcatgtgtctttatagcagcatgatttatagtcctttgggtatatacccagtaatgggatggctgggtcaaatggtatttctagttctagatccctgaggaatcgccacactgacttccacaatggttgaactagtttacagtcccaccaacagtgtaaaagtgttcctatttctccacatcctctccagcacctgttgtttcctgactttttaatgattgccattctaactggtgtgagatgatatctcatagtggttttgatttgcatttctctgatggccagtgatgatgagcatttcttcatgtgttttttggctgcataaatgtcttcttttgagaagtgtctgttcatgtccttcgcccactttttgatggggttgtttgtttttttcttgtaaatttgtttgagttcattgtagattctggatattagccctttgtcagatgagtaggttgcgaaaattttctcccatgttgtaggttgcctgttcactctgatggtagtttcttttgctgtgcagaagctctttagtttaattagatcccatttgtcaattttggcttttgttgccattgcttttggtgttttggacatgaagtccttgcccacgcctatgtcctgaatggtaatgcctaggttttcttctagggtttttatggttttaggtctaaagtttaaatctttaatccatcttgaattgatttttgtataaggtgtaaggaagggatccagtttcagctttctacatatggctagccagttttcacagcaccatttattaaatagggaatccttttcccattgcttgtttttctcaggtttgtcaaagataagatagttgtagatatgcggcattatttctgagggctctgttctgttccattgatctatatctctgttttggtaccagtaccatgctgttttggttactgtagccttgtagtatcgtttgaagtcaggtagtgtgatgcctccagctttgttcttttggcttaggattgacttggcgatgcgggctcttttttggttccatatgaactttaaagtagttttttccaattctgtgaagaaagtcattggtagcttgatggggatggcattgaatctgtaaattaccttgggcagtatggccattttcacgatattgattcttcctacccatgagcatggaatgttcttccatttgtttgtgtcctcttttatttccttgagcagtggtttgtagttctccttgaagaggtccttcacatcccttgtaagttggattcctaggtattttattctctttgaagcaattgtgaatgggagttcacccatgatttggctctctgtttgtctgttgttggtgtataagaatgcttgtgatttttgtacattgattttgtatcctgagactttgctgaagttgcttatcagcttaaggagattttgggctgagacgatggggttttctagataaacaatcatgtcgtctgcaaacagggacaatttgacttcctcttttcctaattgaataccctttatttccttctcctgcctgattgccctggccagaacttccaacactatgttgaataggagcggtgagagagggcatccctgtcttgtgccagttttcaaagggaatgcttccagtttttgcccattcagtatgatattggctgtgggtttgtcatagatagctcttattattttgagatacgtcccatcaatacctaatttattgagagtttttagcatgaagggttgttgaattttgtcaaaggctttttctgcatctattgagataatcatgtggtttttgtctttggctctgtttatatgctggattacatttattgatttgcgtatattgaaccagccttgcatcccagggatgaagcccacttgatcatggtggataagctttttgatgtgctgctggattcagtttgccagtattttattgaggatttttgcatcaatgttcatcaaggatattggtctaaaattctcttttttggttgtgtctctgcccagctttggtatcagaatgatgctggcctcataaaatgagttagggaggattccctctttttctattgattggaatagtttcagaaggaatggtaccagttcctccttgtacctctggtagaattcggctgtgaatccatctggtcctggactctttttggttggtaaactattgattattgccacaatttcggagcctgttattggtctattcagagattcaacttcttcctggtttagtcttgggagagtgtatgtgtcgaggaatgtatccatttcttctagattttctagtttatttgcgtagaggtgtttatagtattctctgatggtagtttgtatttctgtgggatcggtggtgatatcccctttatcattttttattgtgtctatttgattcttctctctttttttctttattagtcttgctagcggtctatcaattttgttgatcctttcaaaaaaccagctcctggattaattaattttttgaagggttttttgtgtctctatttccttcagttctgctctgattttagttatttcttgccttctgctagcttttgaatgtgtttgctcttgcttttctagttcttttaattgtgatgttagggtgtcaattttggatctttcctgctttctcttgtaggcatttagtgctataaatttccctctacacactgctttgaatgcgtcccagagattctggtatgtggtgtctttgttctcgttggtttcaaagaacatctttatttctgccttcatttcgttatgtacccagtagtcattcaggagcaggttgttcagtttccatgtagttgagcggctttgagtgagattcttaatcctgagttctagtttgattgcactgtggtctgagagatagtttgttataatttctgttcttttacatttgctgaggagagctttacttccaactatgtggtcaattttggaataggtgtggtgtggtgctgaaaaaaatgtatattctgttgatttggggtggagaattctgtagatgtctattaggtctgcttggtgcagagctgagttcaattcctgggtgtccttgttgactttctgtctcgttgatctgtctaatgttgacagtggggtgttaaagtctcccattattaatgtgtgggagtctaagtctctttgtaggtcactgaggacttgctttatgaatctgggtgctcctgtattgggtgcataaatatttaggatagttagctcctcttgttgaattgatccctttaccattatgtaatggccttctttgtctcttttgatctttgttggtttaaagtctgttttatcagagactaggattgcaacccctgcctttttttgttttctattggcttggtagatcttcctccatccttttattttgagcctatgtgtgtctctgcacatgagatgggtttcctgaatacagcacactgatgggtcttgactctttatccaacttgccagtctgtgtcttttaattgcagaatttagtccatttatatttaaagttaatattgttatgtgtgaatttgatcctgtcattatgatgttagctggtgattttgctcattagttgatgcagtttcttcctagtctcgatggtctttacattttggcatgattttgcagcagctggtaccggttgttcctttccatgtttagcgcttccttcaggagctcttttagggcaggcctggtggtgacaaaatctctcagcatttgcttgtctataaagtattttatttctccttcacttatgaagcttagtttggctggatatgaaattctgggttgaaaattcttttctttaagaatgttgaatattggcccccactctcttctggcttgtagggtttctgccgagagatccgctgttagtctgatgggctttcctttgagggtaacctgacctttctctctggctgcccttaacattttttccttcatttcaactttggtgaatctgacaattatgtgtcttggagttgctcttctcgaggaatatctttgtggcgttctctgtatttcctgaatctgaacgttggcctgccttgctagattggggaagttctcctggataatatcctgcagagtgttttccaacttggttccattctccacatcactttcaggtacaccaatcagacgtagatttggtcttttcacatagtcccatatttcttggaggctttgctcatttctttttattcttttttctctaaacttcccttctcgcttcatttcattcatttcatcttccattgctgataccctttcttccagttgatcgcatcggctcctgaggcttctgcattcttcacgtagttctcgagccttggttttcagctccatcagctcctttaagcacttctctgtattggttattctagttatacattcttctaaatttttttcaaagttttcaacttctttgcctttggtttgaatgtcctcccgtagctcagagtaatttgatcgtctgaagccttcttctctcagctcgtcaaaatcattctccatccagctttgttctgttgctggtgcagaactgcgttcctttggaggaggagaggcgctctgcgttttagagtttccagtttttctgttctgttttttccccatctttgtggttttatctacttttggtctttgatgatggtgatgtacagatgggttttcggtgtagatgtcctttctgtttgttagttttccttctaacagacaggaccctcagctgcaggtctgttggaataccctgccgtgtgaggtgtcagtgtgcccctgctggggggtgcctcccagttaggctgctcgggggtcaggggtcagggacccacttgaggaggcagtctgcccgttctcagatctccagctgcgtgctgggagaaccactgctctcttcaaagctgtcagacagggacacttaagtctgcagaggttactgctgtctttttgtttgtctgtgccctgcccccagaggtggagcctacagaggcaggcaggcctccttgagctgtggtgggctccccccagttcgagcttccaggctgctttgtttacctaagcaagcctgggcaatggcgggcgcccctcccccagcctcgttgccgccttgcagtttgatctcagactgctgtgctagcaatcagcgagattccgtgggcgtaggaccctctgagccagttgtgggatatagtctcgtggtgcgcggtttcttaagccggtctgaaaagcgcaatattcgggtgggagtgacccgattttccaggtgcgtccatcacccctttctttgactcagaaagggaactccctgaccccttgtgcttcccggtgaggcaatgccttgccctgcttcggctcgcgcatggtgcgcacacacactggcctgcgcccactgtctggcactccctagtgagatgaacccggtacctcagatggaaatgcagaaatcacccgtcttctgcgtcgctcacgctgggagctgtagaccggagctgttcctattcggccatcttkgctcctcctcccccaggtgttctttgtgcttcttgtatttggatgtctaggcctctatcaaggccagggaagttttcccctattgctcctccaaatatgttttcaaaacttttagaattcccttcttccttaggaataccaattattctttaggtttggtcatttaacataatctcagacttcgtaggggctttgttcattttttcttattcttttttctttgtctttgttggattgggttaatttgaagaccttgtcttcagactctgaatttttttcttctacttgttcaattctattgatgagactttccagaggattttgcatttctataagtgtgtccagtgtttcctgaagttttgattgttttttctttatgctatgctatctatttccttgaatatttatcccttcacttcttatttttkttgttgttgttgttgtttttattatttcctttcactgggcttcacctttctctggtgcctccctgattagcttaataactaacctcctgaattcgttttcaggtaaatcagggatttttttttatcttggcttggatccattgctggtgagctagtgtgatttttttggggtgttaaagaaccttgttttgtcatattacctgagttgggtttctggttccttctcatttgagtgggctctgtcagagggaaactctagggctgaaggctgttcttcagattcttttgtctcaaagggtgttcccccatctctccctccttttttatggatgtggcttcctgtgagctgagctgcagtgattgttatctctcttttgggtctagccacccagcaagtctacctggctctgggctgatactggaggttgtctgcacagagtcctgtgatgcgaactgtgtatgggtctctctgctgtgaataccagcacagtatttggggtgtctcccgggtcctgcaggagcagtccatttccttcagagggtctgtgggtcctcttgggattcctggtgtgttcatgaagggtgctggagccaaaattcatgatgcaagcctccacatgctgctctgtccatccgagtctgagctgcaattactcctgactcttgtccaccatgatgatcctacgaaccttttttaaaattattgttattaaaaacaacaaaacaccaaacttttctcctttttattttttttcttgcttcacttttaaatctcaaattagtcattataggagtcaagtcgcattgaaatcagatatgtagtaagagtttagatatggataagattgaaagtgtggtcatcagggttttggaggattttgctgataataggatatgtcagacttgaagaccagagggtggcaggaatgtggtcaggttcaggccctgggttgaagacayaggcagggatgrtaggagggaattattgtagatcctatgtgtcctaacatcaagtcctaggttcaactgaattggtggttttaaatggggagtttggaaatggaaattaatctaagagggttrtttctgcttttctgttgcttacagattcttaagacccctctctttctattcctttcttatgagtacccctttcagcttactattgctaaggaaaggatcttctcaagggaaactgtcttacttgccctaggagccctggatgggaactcccctcctcaacgccaggatgtagaccatgatttcttcctcctcttcagtgtggtagatgagaacctcagctggcatctcaatgagaacattgccacttactgctcagatcctgcttcagtggacaaagaagatgagacatttcaggagagcaataggatgcatggtgagttgggaaaaggtggccacattgtgacagggaacattgttggagggtatccactgggyctagtatttggtggatgctttcacatacatagtcctttttagtcatcacgagggcaaggagtagtagatggctcttccctgttttacatgtgaggacactgaggctcctaagattatgcagcagataaatggcacagctaaaattccaaccttggtctctctgactgcatagattgtgctcttgccattaggctattctgcctcataatgtggaatagcacacagtctaaagttatatagtatatggtcaattactttgctgtgggttgcccactgatacaattaatcaatattgatttgttttaaaaaggaagaagttagcagaattatccactttgtggagaaaaatggtttctttcaagctaccttgcttatatctcccatcgtactctgtgcttatgtctataaggacattgaccatattaattaaattgaaaaagaaactaaaggcacagaagaaccgaggcatgaatattgaactgattttaggaatataaacaagtcagttttgtttttgtttcattaaggaagtcatttactggccattcatgacaggggtgggctaaaaaccatacagtccccaaaggaggtggaaattcagaaggaagatgtaaaggatggcttggatagctcaactttttcttgaattttataccaattgattataaaagccatgttaattagtcagccaatttgacaattgtcctgtggaaatttttagaatgaaaccaccctgaaagaatagcctgcaaaataactaaattccttagagagcttcttcacatttctggtttggaatattggctgtaagcatttattagctctatggcattggkaaagaagtaacttcacctctctgagtcttggttttctctctctctctcttttttaatgagactaatgatatctgcctatttctcagggatgtttttgagatttaaagaagataatacataggtcaacacagtgtgctgtttataacctcatttaaatattatctattattgtcaaatggtaaggcttcttccatttggctgtcctttcctaatcctgatattttctttgggttttcttttgcagcaatcaatggctttgtttttgggaatttacctgagctgaacatgtgtgcacagaaacgtgtggcctggcacttgtttggcatgggcaatgaaattgatgtccacacagcatttttccatggacagatgctgactacccgtggacaccacactgatgtggctaacatctttccagccacctttgtgactgctgagatggtgccctgggaacctggtacctggttaattagctgccaagtgaacagtcactttcgaggtgagatccaacatttctgaccattgggttgtaagagagaggtatgataatggtcaagggaggctgggtttctggcctgaagccataaataagtcctccagttgaggcatcttgggataaaggatagcacactagattagaagtcaggggacccaggttttttcctgaatctgctgggaaacttgctggataactttgggcacatctctctgtgtttaatcttccccatcttgaacataagacagcctggggatggataagtagacttttaatcagctttttattatttgcttagaattctaaacaattaatacctggagacattttcaacatattgaacagggagtgaaggagagattaattaaaagagagtaacatttctgtaggagatcatggtgtattgtgggtacatagttacactctggttggaactcaatagaagtaggagtggaaggttttattttcaaagggagaaacattaatgtcattgcagagcaatgtattgaggagcatcagatgcatcagaggggaggaagagcgtatgaagcaatggaaagaatagtagataagtggttaggtttgaatggtagtcttaagtttgtgaaaaactttatatgactttagacaggtgtctttccatttctaggtcacatttgccacatccgtaaaatgggaaagttggtctaaatcgtctcttaaatcctcttcagctgtcattttctagaattatttgatttatggtaaattagaagggtgtcagaaaaatgatatgtgagtacttgaagtggattttagtaggttaggagttgtagactaataggataataaatcttgggtgttaggtttgacacaataggggacagttacatgtactccattatccagggtatgtcttagccccaaagcttcctaggtaagagagtataaatatggattgggattagagatgcagcatgatagtggaataagcatagaccttagagacagacatgcttggattcaaatcctcgttccatcacttgtttagccacctttgataaatcatttcacttctctgagcctcttaatagaagtagtgatgtatacctcataaaattgtaatgaggttttagagtaaaaatgtgattttggatcttagagaatagggggatgatataaacaagatagtagatataagaaaataaaatgaacaattaagatctgtagttgaaagatgagagtttaactctcaactccacctctgactagctgtgcaaccttgggcaagttatttaacctgtctgacctttagttttcttcatccgcaaaaggggacattaaaagtctatttcatacaatggttgtaaggattgatagagataacatatgtactccctgggactgaaattttaaaaaagatgtaaagcacctgacacagaacctacctaacataatacatgttgaagaaaataaatattttttcctctcccttcatcatacctcaagtttctaatttacaaatttcaaatctccctgggatgctgtgggatgctaataaaataatatagctgagtgacctctataagttgctaagccaatataagacagtaccatccattgccattgtgacgcaatgtagtatattccacatttgaaaacactacttagaatctacattttccttacggtcccaagtctgaagctttatcttcactgatagaagatgttctattattttgggagcttcccagtttacaaataattaacccctattttaaatttgatgctcctaccagccccatgaggtggattttcctattctctcctttggcaaaagagggaagctcagattgaggaagtgacttgcctaaggtcctacagatagtgcttaaagcttgggcttgaactcgagtttccttacttctgtctctgtgatgttgctacaatgtgagcctttatgaagaggcaggaatgagtatctagtaaatgcatcagtggtggtataagcaagtggaggtacctgaattctaccctggactctctctctcagccatgcactttaagagtgagagaaagcggcccattttggagcaggagtaaagagagtagtggagggtgggtggaggaaacactaacagaaggaggaaggtgagtcctctgggttaaaatcctattggatagaatggggtcagccataatgttcttccttcagatggcatgcaggcactctacaaggtcaagtcttgctccatggcccctcctgtggacctgctcacaggcaaagttcgacagtacttcattgaggcccatgagattcaatgggactatggcccgatggggcatgatgggagtactgggaagaatttgagagagccaggcaggtaagagrcagtgggatccctctctttaattctttaattggtccagctccaaacatttattatctttcttccagaaatctctcactttactcagggatccaaatcattgtctggctggggttacatgaaccaactgttagccaagttcttgtgtccccctggagagcttgctcttggggagatacaggtagcaaagctttttgtggggttatyccatatccccacaaagggtccaaacagagtttgaagttggtcctactataattcctggccattttcataaaggaaagcccaggtgggaccagttcttgtatcagttgaaatagcttttattccaggtttcttcactttacccattatttacctccttgctccttcatttcttttctatagtctgaatgaggcatttgagcaggggtataaaaagcactctgagaaatgtaggaagagaggcagcctgctttttggctatcacatgcccattcttttgaaggaatttctccaagttctcctgcctcatccatgacccagatatgggcaagatagagtaggaggttagtgccctactcagttgctgggtcttaagtcataccactcactgggaaatcgatgatgacaggtcttccacagaggaggcacttgataggtaactaagagaggggttgggggaagatccttcatggttatacttctagcaggaaataatagagtaaatctggagaaaacttaggaaagttggtgtttgagtctcagcatggattctacgatttccagctgggcttattaacatagtgggctttcattttggagtgaaaggattattaatacctaaggatgattaaggacagatgtagactatgaatctctggagggcagaactggtcccagtgcctggaaattataagcaagaatattccaacttacrctaaaatagaattccaataatttaaaatatccaacagtaagggagattgtctcctctggatatgagtttcctatttttggaaaggctcaagcagaagctgtatataactttctagtggtgccaccaaaggagatatcttcactggtgggagttaacttagatgagctctgaggtccttcctaaatataaagattcataacttggtgagactaagggtgagatgggagtctatttgatacctaatgaaataatatcatattttcctttttatacatcagtatctcagataagtttttccagaagagctccagccgaattgggggcacttactggaaagtgcgatatgaagcctttcaagatgagacattccaagagaagatgcatttggaggaagataggcatcttggaatcctgggtgaggaatttttaaattatgaaattcatttactagagccagagaattgaggaagactttgaaactgaggcctggacatcacttaggagcacattgtagaccagcatctcccaaagtgagtcttatgagatgattgttttgtgaaagagttatgagtctgaatgtgttttaaaaccactaagttaagcagttaaatagtgctttttatgctacaggatttctaggagccttaggtttatttttgtttatcatgaatctccactttttttcagtgaatatcttccaataccactgatgtacagtacacatttttagaattccttctctagaagtattcctaaagggctatataaggaagtaagactgtataggttctcagcaatctggggccagtagcagattggcatgacatgcagacatacttgaaataggaggaatgcagaataggcttagagtctgaacttgaagaaggtatctagaagggctaaaccaaggttagawgtggtttagtagcatgatggaaccagaaaataaaataggccagatggaaaaaaaactttggaaattaatataatggaccatactcgggataggtgtgtgccagttgattctagatctgataatggacaatagatcttacatcagctggatagggagatacaatgaggagaaatccaccataggaaggagagatggtggtgagcctgaaggaattatcattggctggacttcagtatgagtgcccagtctttgagatgaggtgaaacattagatgtggaaattgaataggaaaccaagctagaaactctgaccaagagttagagccggaataagtgcccagttttggtactttttgtctgcttcaaagatgacctaagctagattacatgtggtgggtaatgaagttcagaagagtccaggagttgtggctagattacctagtacagtgcctggatagaagatatcataattctctttgctcagaattggtttcagattgaggcaagcacagatcttagataggtccacaaagacatgtagctatgggatctgggacaataaagtaagtgaaaatgagattggggctgacaatgggatgagagaaattgctggcctctggtcctggctgaatggctwatcaaccatttaaatttgcataggtaaattccacttctctcagctgaaattttctcatctgtaaattggagttaataatttttgccctatatgccttaaaatgatgtttgagaatcaaaataagataatggatttcccagtgttttctgtaattgtaaattgcaatatacttgaaaggaattgttcttattattacaaagaaaagttttttattttcttcttcactttcactttccttttctttccctccctcttcttccatttccttcctccctgtttatccctttcatcattctcattgtctctccttcccattttccagggccagtgatccgggctgaggtgggtgacaccattcaggtggtcttctacaaccgtgcctcccagccattcagcatgcagccccatggggtcttttatgagaaagactatgaaggcactgtgtacaatgatggtgagccaacagggtytctagtaaatgtgggctctaggtggtaccatgtgtctctagaaaacaaataaatgggagatggagaggatgaagtaggcagaattakttgccatatgtggatgttgttgaatgaatgaataatataatagtaaaacagagctgggcttcaataataagagaaaatttcttttaaatatatttaaatatatcctaattttaaaaataagtttattatagaactctgaaaagcagacaattacaaagtaaataagcatcatttatagattgtcatataaattttgatatacctttaaatatttttatgtgcttatacaagtctatatatagagatatgtgatcatatggtttgtacagttttgcatcctactattctcagttaccattgtattgtgtttgtttttctatgccattaaaatgctacaaacattttaatgactataaaacactttatctcaaggatttgtcraaatttatttactttttcctctattgcttggacatgtaggtttttttcagtatttttgaatattgtaagtcaggttgcaatgaatgaatgcatatatcctagcttgcattttggattactgtatcaggagagaatcttagaagtgagagtattgtgtaattgattttttactttatctaagaatattaatgcatgctaattctagccaaactataaaagaaaaactgaaagcataaagagcaaagttgcagacaaatctagaatgaacattctataaggcaactggtctagtctcttcaagaagtcaataccatcaataaggggattagagacataacaaatgaaatgtgcaaattttgattgattctgcttgtaaaaatagctttaggagacattttggagataattgcaaaattcttgatatagactggatattagatgttattagggaattttcttaggtggaataatggcattatagcgacataggagatgcgtgctaatatcatgatgtttgtattctacttccaartgattcaacaaaagcaaacaaacaaaaactgtatgtatgtgtgtgtagatgtatatacacatagagtagataaataaagatggcaaaatgttagcaatagactctaggtgataggttgatcattgcactattttttaaagttttctgtatatttgaaaatttgaaaagtaagaaataatgaatgaataaggaaaggtaggttaaaaccatcctaaattatagccccttgttataagctatactagaaatatccttccatatgtttctttgaatgtttttataaacctttcttcagaatatatttttaagttggggaattgctatatcagaggctatgtacattaaaatttttggtacctacacccaaattactctctggaaagatttgcagtcctatcagtttagagttccattagcagtacctgaggaggactccttttcttacaacctcatcagcactggggaaatctttttaatcttgtcaaaatgacagtcttgtaggcaaacgacagcatcaacaaaactcactgttgttttgatttacatttgtttgattatttcatgttgaacattcagtatttattgcatatattattctacttgtgcatatgaaccttttaaagaaatagctttgtctacattttggtgtactttttttttttcaaattttgtctatattttttttcaagtgttattcccttttacatttacactctttataggtgagtgagtagggtaggtgccatctaaaccacttcttaccatcatgcattattacaatttgtaaaatctttgctaaattaatttgtaaaaaagttatctagctattttcaattgtacttctttgattactgatggcatgaaaatttgaaaaaggtctgtgcattgcttgaccatgtcttgtgtccattttagaaattacagccttagtgttttatatatatatgtatatatatacatacatacataacatatacacacccacatgtacataatacatattaaaagaaaaaaattaaataatcagagctgttcaaagatgacatggactataatggcaggtagtgagtcccccatcactggagagttttaagcagaagtagggatgtaagagcagattaatgtatgttttcaagtgagagatgttccaaataagtcttaaagtccatttttartcccaaagtcctatgattttggaaaactgaaacatagggaagattaaattgctgcatttcatatagcaagtaatggaagaaygagaaaataaactcatctcttgactccttgaccagagttctcctcattattcaatattccatgttgctgctactgctgctccaaaatgcctttgtagttcataatctttatttcactgtttggagctgatgattctcattctagtcaatctaagtaatgagtcccatattttcactacaggctcatcttaccctggcttggttgccaagccctttgagaaagtaacataccgctggacagtcccccctcatgccggtcccactgctcaggatcctgcttgtctcacttggatgtacttctctgctgcagatcccataagagacacaaattctggcctggtgggcccgctgctggtgtgcagggctggtgccttgrgtgcasatggcaagcaggtattgtcagggttatctggctggaaagcctgctgggagaaggatgaagctgggttgctggataggagttaagcatgraactgggttctaaagtttagggaatagaagaaaaataatcaagctggtccatcagaaattaatagttggtgacctcatrctatcttgcatgttattttttgtactgacaaatatatatcttccttagccttgcagataattcatgatatcctttcatcatcttcttctttcctccctccttccctccctccctcyctctccctttccctctccccctctccctttccctctccctcacctcggtggcccctaaaccttgctcctgatccataaatctgctttaatatttgcttgtcttcttttgtattcagcccacaatttctagctgtgtaacattgggtgagctacttaacttctctttgactccgtttcctcatttgtaaaaatgggataacgatggaagaagacaccttggatttctgtgaagattaattaaaataacccatataaagtgcctagcacagtgtctggcacatattaagcactcagtaaatgttagtggtaacaataattatcactgatattacttatcttttattttctagtttccccccaagaccctcccctgcttttctagccacctcccctcattcctctccccaggtgattaccatctctcttcttttacactctatacctcttatttcttatcctatgctccttccctgcccactttcatacagtcttccctgtcaggcttgtacttttattgtgacattcttctctcatctgcaatttgaggttacctaaggaaaaactgctgcagctctggataggaggtatggtctcaaaatgggaaaaggaaatgggaaagaatctggcatcccttgatctgtaacgacacagtctacaactgctgaaactattgtcattattccctctactttcttctattgggcctgcagaaaggggtggataaagaattctttcttctcttcactgtgttggatgagaacaagagctggtacagcaatrccaatcaagcagctgctatgttggatttccgactgctttcagaggatattgagggcttccaagactccaatcggatgcatggtatggggagtacttttgccctgggctaaattgagggtcccaagtaaaatctaactttaaccgtaatcatgaccaatcctgaaaacactgattttattggtcatctctgtccaagaggcgagctagattgagaggctcaaccgaacacaacagatcttatacttagtacctttgggtgctgtgtcctgtgttacacagtatgggggaaactggaagaaagtactgcaaaatgagggtgtgcacaagaaatctacaagagattgtgaagaataagccagatgatacctttccaatcttatctcccctcttccttatattttagtaccttgggtcccccccccccatactccagccaactggggctatttttctttgtgaacatgctgatttcatgcttttgcagtgctgttcccttcacttgaaatgctccatctcttgattcccattactagttagtttcatcatttggaaaaagtaaaaccatctcatgagcaaagttcattccagttagaatttactgagcgcctaattggtactaggtaatgtgctaggtgctcaggcagtcacatagatatagaaaaaaaatgatatgcttcctgttatgtcaatccagtgcaggaaatagatttgtaagtaaatcaccagaaagtatatcagttacaatccatggcaactgatactgcagaattttgtgggataaaattttcatggatcgaagagagagtaaagtatagctgaacgaagatacgacaggtaagtggtaggatgccatagaaagagaccataagggaagtttattccagaaagaggaaatcatgtgaaaagtcaacaggtattatcaaagcacctacaatatttaaagctttggtaatgcagagaaaaatagagctcacaggacaatggtgtgtgtgtgtgtgtgtatggaagaggatgggaggacagactgcaggtaggggtaccagagaggaggctattttagttcaggccagggaggatgagggccagaaccagggcagtagcagtgaagatgaagaggaggaaacaggttgagagctgaagatggaattttcagatccccaacacgtatgggggcgtggaaaatgagatctatatggaaaaggaacaatcagagtggttgtaaaaggaccagaaagtatgttgccacagaaaccaaggaaggagagtttcaagaaatagggaataggagagattggtgtgtgtgtgtgtgtgtgtgtgtgtgtgtgtttggtagtggagaatagttcaatgttgtcaggatgtggatcatggtggaggtgaggccagaaaggacagttgagcactcatcccaaagacagagatattcacgagtagagttaaagtggcatagagaggaaggcagaggtgttgaggatgactcakcagtttcaagttgtgtgaaaccatagtacatagctgatgccatgctcctggccagtgctggagtagtctggtctcatstccccaccttgtcttgtgtttttgttttccagccattaatgggtttctgttctctaacctgcccaggctggacatgtgcaagggtgacacagtggcctggcacctgctcggcctgggcacagagactgatgtgcatggagtcatgttccagggcaacactgtgcagcttcagggcatgaggaagggtgcagctatgctctttcctcatacctttgtcatggccatcatgcagcctgacaaccttggtaagtgccttagcrgctggccctagaggctttgttgggtatagggccaggaatggggtcgggaagagggagggatggtgaagagaaaataataggcatgttaagggttctaggaagtttttaaaaacacttgtctttttcttcttcaatgtgctctccatgttctggttacttggattccctactcagctgcaggcagaatagttagtagaaggtggaggaagctcttttctggaacaacagaagggaagttgggatgttgctcagctttagtgaagttcttatatggcagggagtggacttgacaacacagagattttataggtacagtacttttattgggaggaaggtcaataaaatgcacttataagtgctatcaaattgatattctgtgaggctttctacagactcatttctgatctctccctctctctttctctttctacccatgatgcgccccaccctctgccccctgccaccccgtgtgtgtgtttgtgtgtgtgtgtggtgatgtaacaatttcagcctggaaatcagaacacaggagccctagttcaggctctttcattaacttgctgcgtaactttggtctaattacttcccttctctctagctagatttcctgccttgattctttcctttctgccttccttccttctgtccttttgtcctccctccatctctccttccctctatatcctttttcttccttttatgaagatatttgactataatgtttcttcagattctatgtatttctagaatttcataatagagcagttatcttttctttagtccctatggtgtatttttttttccagccattagatggcaatagtgtttgtaagaacaacctgtcagctccacgcagttcctattaaacttttgttttactcctgtaaatttcattcatatctggggggaaaaacatccttgaacaagtgtcttcaacgctttaataatattaacctagtcctgagtttgacaaacacttgacataaagctggtctcctcagaaatagaaaggacaatttggaggctattgcagttttctctgtgagagaagcttgtggcttggactcgggaagtggcagtttaaacgaaaaaataattttgaaggaattgctgataggatttactgatgcaatagataacggtggtaagggaaatagaagaagtagatgtggaaagaaatgagtagaccctttctttcaacgtgtttataaactagtagaagggatcattttaaaagagaggggcacttagccctttaacmtgtggtttagatataaagtgcattagaggtggagaagtgaagaatgtagaactctatttgggccaaaatagtcagggagggctttctggaaaagaaacatgaattgagtcttggataatgagtggactctcatagatacttgggggtggggtgggcaggtaagttccagaaagaggataacaaaatgaatgaagatttcaaggtaggaatgaatgagatgtgtgagagaaacagtcagagttccatgtagttggagtgctagttgagtttgagacaatgtgtgggaggtggaactggattggtagtttggtgccaactcatagaaggctttgaaagccaggaagaagagtttgtagtgatgggataagcactgagcagcaaagtaaggaaacaatgagagtaatgttctaagaaatttagcttcttttgatcgacattgagtttgagtatccttgagttagaaatttggagcttaagatctggtccaggcaacttcacaacacagacatttaagactgttacctgcacattccattgtaaaaaatgagtgaaggaccttctaaagctgtcttaggtaagcatccctctgcaatcaagacattctctttctttttacctaactattgaagtctactttatttctttggtacttgataggagacaactcatcaatgtttttcttggaataagaattattacagctatatttacttatttatagcatcacttaactgaacattgaatatgttctatactaagcactgttcacaaattattgtgtttaattgtaaaacaaccaaataaagtaaaataatcctcattttactgatgagggaactgaaaaacacagaggtttagcaattgccacaaggttttatgtgtgcatatatatatatatatatatatatatayacacacacacacacacataatatatttttatatatgtatatatatatgatttatatataataaatgaaagatagggttaccaaccatggcagtttgcctagtactgaggggtttctaggaatatgggacttacagtgctaaaactagaaacaccctggaagaagttggttattctagcggcagagtttagttttaataaacccagtgtatgtagctttggagccggagctcttaacctttgagcccattactctcaataaactttaaatactcttttatctatgtgtagttaaggcaagagccttatctgagactatctgaaactaactcttttctgcagtatgcctagggaaaggcaggaaatcccccaggcactacccagggatgttctgagtcagatttttctctctgatcctccctcagggacatttgagmtttattgccaggcaggcagccatcgagaagcagggatgagggcaatctataatgtctcccagtgtcctggccaccaagccacccctcgccaacgctaccaagctgcaagaatctactatatcatggcagaagaagtagagtgggactattgccctgaccggagctgggaacgggaatggcacaaccagtctgagaaggacaggtaaggcttcataaatggagagattacacttttagaaaaacattttgcaaatgagaatactgaaattctgagatgaggagactcttatctcaggtctcctaatgtgataccaacagatttgggagatggggctataatgcagctcttatgaattctagctcactgctgcttccatattgatatagggagggaataaagcttgcccacaccttcaccctcttaatctttgtctctcttctttcagttagctggaagtatttaccctgggacttaaattttacaggatttactcaagggattgaatgtctcaagctcagctgtcccttgacaaaatggcattgcatttattaaggtacagactaagctatgtagcagaaaatgtctaaaacagagtgatttaaatatgatagaattttatttcttattcacataataatacaaatatgagcaattcagggctggcaggtgaaccctatcatcctcagcacttgctttcctttctggggccaagatgtctgttccagttgtagctattcccggctatcatgaagaaagaaagaaagaagtccagggcaagcagcattgtctataaggacacagcatggaaattgtatatatcactttttcttatactctgttgttctgaactaattcttatggccataattggctgcaaaaagagtctaaaagatgtaatctctaattagtcagccatgtgctcagctaaaagttaggtgattctattactaaaaaagaaggagagaacggaaatggagatacaaattagcagtctccactactttgtttttggtgctstcactacactttagcaatttttactctttgcgttgttcgttgaaggttgaagtcttcctgctaaacatctaaaaattttactttatttttaattcttgatttttgatgttcagatagacatacaattatgaaaacaaaaatccatggaatgtatgctaagttttctgtaaacagaagcagataactgggctggacatttttttgaagattccatctatcacctctgtctatatacatgctaaaaggaaaatatgttactaattgatactgactttgaaaacactaatttaagccacaattgaattwtcagcaactactgagaataaaatttgactttatgtagaaatcagttatttatttagttcctctcacttgtttctgatcagaacccagtgagatacttctaacaagatcttataatttaaaaaaaagaaaaaggaaaagagatatttacatcagttttttaaaaatataatattagttgctagcattcaggtagggcccaagtgagaatggtttttttaataatttggacttttattatagattcaggcagtacatgtgcaggtttcttacatgggtatattgtgcaatgctacattttagaatataaatgatcctgtcatccaggtagtgagcatagtatccaatagttagtttttcaaccgttttccgcatccctcctccccctttagtaatccccagtgtctcttgttaaatctttcttttaattaatttcaacttttattttaggtatgggggtacatgtgcaggtttgttacatgggcatgttatgtgatgctgaggtttggggtacagatcccatcacataggtagtaagcatagtacccaatagtttttcaacccttgccctccaccccaatttctattgttgccatctttatgtccatatgtacccaatgcatagctaccacttataagtgagaacttttttgttttctgttcctgcattcatttgctgagaaattaatggcctccaggtayatccatgttgctgaaaaggacataatttcattctttttcaagtctgcatagaattccattgtttgtacataccacattttctttatccagtccaccactgatgggcacctaggttgattctatgtctttgctattgtgaatagtgctgtgatgaacatatgaatgcatgtgtctttttgatagaatgatctatttttcatgctttttttttttttgagatagagtctcagtctgtcacccaggctggagtgcagtggtgtgatcttggctcactgcaaccaccacctcccaggttcaagcaattctcctgcctcagcctcccaagtagctgggactacaggtgcacgctgccacacccatatattgcccatttttaatggggtgatttgttttttgcttgctgaattgtttcagtttttggaaattttaaaaagtgacttcccgtctctgaacctgggtatactcatcttgaaaatgatgcagtataagatgaaagaacaggactagaaaacgagggagggaaggagcagcagacttgaatctaaatcctggctcactttctggctaacaatgtcacttgtagaataagtcctgtcatctctgtgcaattgattgcacctctggcacctacctaccccataggcctattagaaatatcaaatgataaatctgtttktaaactagacagaatcctataaggagaaaatctgtaagatttcattccctccctatgtctcaccatcctttgccctctggttgcagcagtagttaatactttcctgccaccttgtatcttgccttttgtaaaactaatttcatcaagacatcattagggctggagctaaagcctgtggcttctgattcttagcccagtgctcttatagtatgaattatataccaaatttgtatttggatgatggcaaacaaggaaacctgccatctttttttttttttttttttttttttttttttttttttttttttgacaaagcctcactctgttgcccaggctggagtgcagtggcatgatcttggctcacagcaacctctgcctcccaggttcaagtgattcttgtgcctcagccacccaagtagctgggattacgggcacaagccactacacccagctgattttttttttaatttttagtagagatagggttttgccatgttgggcaggctggtctcaaactcctgagcttaagcaatctaccggccttagcatcccaaagtgctgagattacaggtgtgagccactgtgtatggcatacctgccaactttaattgtggttatgcagccaatgtggtgagaagtctgacattagaagaaataggggccaggtgtggtggctcatgcctgtaatcccagcactttgggaggccaaggtgggtgaatcatctgaggtcaggagttcaaaaccagcctgaccaacatggagaaaccctgtctctactaaaaaatacaaaaagtagccgggcgtggtggcgcatgcctgtaatcccagctactctggaggctgaggcaggataatcgcttgaactcggaaggcggaggttgtggtgagccgagatcatgccattgcactccagcctgggcaacaagagcgaaactccgtctaaaataataataataataaataaatttaaaaaaaagaaaaaaaaagaaataggtccccccccttttttttttctgtctgtgacatgaagctggttctgacttagcttccccataaatactcaaatgaaaatgaggggttgatggccaggtgctgatagtactctttggattcctctagttayrgttacattttcctgagcaacaaggatgggctcctgggttccagatacaagaaagctgtattcagggaatacactgatggtacrttcaggatccctcggccaaggactggaccagaagaacacttgggaatcttgggtaagggaattctacttccctcctagtgtttagcagcctgaactccacctagggaagctatgttataccaggatggcctcactattccccattctcaatgttttcatatgatatactggaattatggaatattttatgaaacaaccrtgacaataaacagtgaagggggaggaaggaaatcatgaattcatgaaccagattttactgggttttctatagcttcaaggtatgagtctctgaggatggtaagttgtrataaatgctaggggcagaataacttaggaacatcaaaatgtgaaaaaactatatatatacacaaggaatcagttttttcattgtaccgctgtttaattattgctttaggtggtttcccccttattctagttatggtacagaagggacccactgactcctaaagagatcctctcaattctttattgtctgccaaacttatcactctttatcgtcaatgattccacagcaccttgattctttagacccttgggctgttatagatagagggtaggggtgggaaaagtggaggtaattggaagtataatcttgtcattgaagtaccttcatcctgtgggtagtagtaacagtttaaggacttctgaatcttaaaatggagccagccatgccttctaggtcttagaaggatgttttgtcagggtaaaccactaattctatgaagtgctcatatatgtccctttctttaatgctccctgtgctcctgcattaatkaaactttatttatttaattatttttgtttacattaggtccacttatcaaaggtgaagttggtgatatcctgactgtggtattcaagaataatgccagccgcccctactctgtgcatgctcatggagtgctagaatctactactgtctggccactggctgctgagcctggtgagtgggracacttagtgaaagaacaaaggacatgcatcacgtctgcttcaggcttctggatttttccttaaaaaattaatgtacttcagactggagtgatagctcattcctgtaatcccagcagtttgagaggctgaggcgggtggatcacttgaggttaggagttcaagactagcctggccaacatggtgaaccctcatctctaccaaaaatacaaaaattagctgggtgcagtggtgtgcacctgtagtctcagctactcgggaggtttaggcaggagaatctcttgaacccaggaggtggaggctgcagtgagccaacatcatgccactgcactccagcctgggtgacaagtaagactccatctcaaatatatacatacatatatatatatatatatatatatatatatatatatatatatgagcttagakacctgaaataggaatatagccaaaactaagccacagcctgagtttttctctatcaaatactcattttctcaatccccgaataggctatggcttagacttggctaatattcctgtttcagatctctatatacccttggatacagtatgagctcctaatcttgactagagagtgatgtgacctaggccacaagctgatcattcagcccttagcccagtaaataaagttcttgtacccttcttgcagactgaattctaaccccagtcacatactaagctcctaatactaaatatagaataatcataatcttgtcaacattctcttttattaattcattcattgaataaacacttactggaggcctactgggtgacaagaacaactttagaatctatcgatgcagtagtgaacacttgctcctgtcttgaagaaacttgagctgttatgatagaaacaggtaaaactggtaactataatccagtgtgttaagtgttaataggagtttttacagtgtgataggcatgtgaagaaaagggtatttaatctaatgtttgaatagtcaggaatggttttccagattaggtgatatctcagctgagacctaaatcagtagttttcaaaccttagcatgtatcaggatcacctagaggcttgctaaaacacagatcgctggaatcaactttgaaagtctctgattcagtaggtgtgtgatggagctcaggaatttgctcattcaaataagttctcatgctgctagttcagaaactacactttggaaacaggtgacctaaaggatgaaaaaagggacatatgggtgaaggtaaagtacagtatggaagaaaagcagggaaaaggaagttccagatttaaagaatgcagtgtgcaaaggcaaagagattgaagttggtgtaaaggaaaaagaatagattctaaaaagatcaatgaggtaaaataagcaagatatggtgattaattggattttgaaggtgagaaagataagtattattgaatgatatcggtgtttttggagaaagattcttaaataatacccagtttttgatttggacaaccaggaaaatagtgatgccattcatcaagatagggaacataagagaaaggtgacttgagatggagtgggaggattggagtattggatgatgatgagttcccttttgaatttgttggatttggtatatttgtaagttgatcaaatataggtatctagacataaagatagacttacagatctggagcccaggaggaaagtatgctctgaaggaatagatgtgggaagcatcaacatctagatagtggttaaaagcataagagtgaacacagttaccccagaagagtatattgaatgagaaagtaaaaatactcagatgagaccccgaggaaggccaatttttaagggaggtaccgattgaaatgtgagcctgagaaaaagttagcaaaataggaggaaaatcaaaatgagattacagatgttaagaaaggtcatgtcaaggatgaagtagtcaacagcttcagctgctccaaagagttcaaataaaataagagcagaaaattttccattgcttatagcaatagggaaatggctgatgattttgataaattggggaaagaagctatattagaatgtattagagagtaatcgggagataagagattgaaaacagtgagtatggcttaattttaagacttaggcagaacaattttaggtaatgagaaggtcagggttgtgcccaaaggctaaagtaaagtggaggcaaaggacactacagttgaggagatctagggactaataggctagagtgttggataaatcatccacatgcaccttgaagtcactcagaaaaatggtggggattgggatggaaaagaggatggtgatccaggtactaaaataatcaataaatgaccattaagagagaagggatacattggaagttgggaaaccagttagaaggttgtagtgatctacaagtgatgataatggcttaaacaaaggtaatagaaaatgagaatggagacaactagataaatttgagagatgttaaggcagaataaataggatattttgattgaatgggtgttgagaagattagggagatggtggaatcaaggttcataaccaagtttttggattaagcacctggatgttggtaccactcacaaagaaaataaatgcaggaagcagggggcagttttttgtttgtttgtttgtttagagtggggagatgttgactttatttttgaaaatcttaatatgagatgccataaaacatcgaggtggaaatgagagagctgtacggatagaagattatcatcagtttgagatatggatctgtaacttggaagagacacctgggatagcataggaatttaacagtcataagtaattacaatggatgatagttgaaatcatgatatgcatgtaatcacccagtgagatagtgtgtaaagtgacaatggcatcagctgagaatgaaactttggaacatactattatttaagaggaggtactctatcttaaataatgtataggtttaaagtagttctaacttaaattacagttcgatattttattttatttgtacaaatgtaaggagtatatgagaaattttgttacatgtatattatgtatagtgatcaagtcagaatatgtacagtgtccatcatccaagtataatatatttttgttaagtatagtaatcttaatctgctatcaaacattgaattcattccattttactgcatatttgtaccctttaaatcagttttcttcatctttccctttctttcacactcaccacccttcccagtctctgttatctacctttccactcttcacttccatatgatcaaattttttagctcctgcatataagtgagaaaatgcaatgtttgtctttttgtgtctggtttattttacttaagataatgacctccatttccatccatgttgctgcagattatatgatttcattcttttttatggctgaatagtattccattgtgtatatataccacattttctttatccattcatcccttgatgaacacaggttgatttcatatctttattattgtgaatagtgctacaagaaatatataagtgcaggtattccattgatatattgttttcttttcatttgggtaaatacctagtagtgacwttgctggattgaatagtaattttttagtttttttagaaattttcataccatgttttatagtggctccactagtttacatttccaccaatagtgtgtaagagttcccttttctctgaatccttgccagcatctgtcattattatttttttttctttttagtaatagccattctgactagggtaatatgatctgtcattgtggttttaatgtgcatttccctgataattagtaatgttgagcattttttcatatacctgttggccatttgtatgtcttattttgagaaatgtctattcatgtcctttacccactttttaatgtgttttttttttttttcctcttaacttgcttgagtttcttggtattctagtattagtctcctgtcaaatgaatactttgtaatttttttttcccattcagcaggttgtcttttcactctgttgattatttcctttgctgtgcaatagctatttagttaaatatagtcccgtgtgcctatttttggttttattaactgtatttttgaggtcataaattctttgcctcaaccaatgttcaggagagtttccctccagttttcttctagtatttttatagcttcacatatccatcgtgagataattttgtatatggtgagagatataggtccagttttattcttctgcatgtggctgtgcagttttctcagcactatttattaaagaggatgttctttctccaatgtaagtttttgtcagttttgtcaaagatcagttgttgactgtaaatatgtggcaatatttttggattttctattctgtttcattggtctatttgtctatttttataccatgctgttttgattaccatagccttttaatatattttgaagtcaggtaatgtaatgcctccagtggtttatttatttatttatttgtttatggctcaggactgctttggctatttgggctcttttttggtgtcatataaattttcaaatttttaaaaagttttgtgaagaatgacattgatattttgagaggaattgcattgattctgcagattgctttggacaatatggtcattttaatgatattaattcttttgattttttttatttgtttttatcctcttcaatttctttcatcagtgtttgtagttttttttaaattaatttatttattttatttatttattttaattattatactttaagttttagggtacatgtgcacaaaatgcaggttagttacatatgtatacatgtgacatgctggtgcgctgtacccactaactcatcatctagcattaggtctatctcccaatgctatccctccccccttcccccaccccacaacagtccccagagtgtgatgttccccttcctgtgtccatgtgttctcattgttcagttcccacctatgagtgagaatatgcggtgtttggttttttgttcttgtgatagtttactgagaatgatgatttccaatttcatccatgtccctacaaaggacatgtttattgtggcactattcacaatagcaaagacttggaaccaacccaaatgtccaacaatgatagactggattaagaaaatgtggcacatatacaccatggaatactatgcagccataaaaaatgatgagtgtttgtagtttctattgtaaagctctttcacctctttggttaaaatttttactatgtatttttattattcctaggtattttattattttgtataactacaactggatatatttttgtattgcaatgaaattcttgtatgcaaagttcatttggaaaaataaagaatacctgggcaagaagagccaaaacattaaaaaaaaatactgrtgaaatcacactagtgtaacccaatagtatagcatattataaagatgaagttacaataattaaagtgacatgatactgtaaataaaaatcagtaggacaaaacaaacattcctgaagcagacccaagcttctgcctttgtcaatagcaatgggaatacagataatactagtctattactaactgcacaaatctgccttctagaactccatcagcttcagacaagaaagatgttaatttgattagtcagaacctaaaatgtttgctggaaatgtcttaccagtgggcaggattacagtttcttttatctcagcactccctattgcactacccccttccatgtggtaagttgacctatgcctgcaactgggtaaactggatatgtgaattagtacagggtctgtgctgtagatctagctatcttaatttaatgaaatttgagagtcatcagcatgtagatgatatttaaagtgataatatggatgagatcactcaaggagtgagttatacagtaaatagtgaccaaggtggctggattaattcaggtaagagatgatggcagcttggaccagcctgataaagtagaaagggtgagaagttttctaattctggatatattttgttggttaagacaattagcttgtgaattggggtttctagatattcttttttattttcggtagttgctatattttagtcattaatcccttctaggttttaaacatggcagatatcttttcccgatttgtcatctacttgttaactttgtttgtgatatcatttgttgaacagaaatccttgatgtgatgtgatcaaatcaatggaattttggcctcatagtttgtgcttttgaaattttgtttatcaagtccttcccaacccttggtcacaaagacgttctgctgcattatcttctgttaactttataagtttcttttttcacattcaaatctgtaatcagaccagagtttgcatttttatatgctattagctatagatccatttttaatttttctttatatagaaagaaaatttwmttaataacatcttctaaaccattcaactttcccccctttgagttgctttgccaccattatttcatgtttagtttctgtaaatatattaatcagtctccaatctattctgttatatttgtcaattcagttcttgcaataatatcatattatttttattattatgggtttgaaatttgtcttactatttgaagaacaaacctcttttattgaggatttacttaggtgtatgttatttttccatatagattttagagtaagtttcaagtttctcaaatacagctaaaattttgattgacattgcattaaatttatagattaatttggagagaatttacatctttatattatttgttggaatggatttccatttattcagatggtcttctatgactttatagttttgtaaaaatgttgtcataaaggttgtacatatgcttggttaagctaatccattaatgcttcttagtttttcttactacttttaaattatatttctaatagattatttataatgtagagaaatgctattcatttgtgtaagttgaacctgtatctagtagtcttcttgaactcccttattagttttactagtttgttgattccagaaatattgagagttttattcttctatctcttattcctttccatttccatatatgtttgccaggatcaccaatactagkgatggtagtggtcatcttcaactttctcccaatctcaagagagtgcatgtaaagtttctctctctttgctatgattcctttttggaaatttatttaaatttccaaatgaacaaacatttatttaaaattttaatcaagataactgacctaaaaccttcagtagaagaataattttaaaaccatcttcggggtggaggagaaaatggtggataggaagactaacttgcagctcccactgggatggacagagcagcatgtgaagatccatatcatgaatctttgctccaggaactacagcagaaacataccactgagagaatccacagaccctytgatggaggtgcattgccgctgcaagctccatgggacagccaagggactgtgagttgtcttgctttctcagttgggaggcttgtagcctggggaaagttctcagccctgctcaccaactacctggaaataaactcagtgctgttggggaggcatggtgcaattgagaccagcctttcggctgtgggctgtcatctttctttcacttccctggtgacctgtgtgatgcagcagaggcagccataatccccctaggaacataactccactggcctgggaaccacacttgcatcccccaaagcagccacagcaagccctgcccaaggagagtctgagttcaggcacacctaattctgcactcctggtagccaaagacaacgaacacaatctcttagaggctctatgaccctgcgtacaacctgacaaaactgaacacttatccaaaggcgaccctatgagaagcatgtatcctccctacacacctgcagctgatgtgttcttgaaagcaccacctcctgattggaggccaaacaacacaaaaccaatgcacttaataaaaatacaaccgaggactcttacatagtccacttcactcccctgctacctccactggagcaggtgctgatatccatggctgagagacatgaagacggattatatctcaagattctttgcagacactccccattgccagtctggagcccagtagctctgctgggtggctggatccagaagagaaataacaatcactgcagtttctccctagggaaaggggagagcaccacatccagggagcaccctgtgggacaaaataatttgaacagcagcctctgagtcccagatcttccctctaacatagtctacccaaataagaaggaattggaacaccaattctggtaatatgacaaaacaaattatttaacaatccccaaagatcaaactaccttacagcaatggatccaaatcaagataaaaatctctgaatggccagaagaaaaaatcagaaggtagactattaagctaatcaaggaggcaccagagaaaggtgaataacaacttaaagaaattaaaaatatgatacaggatataaatgaaaaaatatccagtgaaatagacagcataagtaaatagttatggtatgacaaaatgcactgaaaagtcacagcagtagaattgaagaagtagaatagcttcagaattcaaagacaaggcttttaaattaactcaatccaacaaagaccaagaaaaaataattttaaagaaaagcctccaagaagtttgggattatgttaaatgaccaaacctaagaataattggtgttcgggaggaagaagagaaatctaaaagtttggaaaacatatttgagggaataatagaggaacatttccctggccttgctagagatctagacaccccaaaacaggaagctcaaagaacacttgggaaattcctctcaaacagatcgttgcctaggtacatagctgtcaggttatctaaagtcaaaactaaggaaagaattataaaaagttgggaggcaaaagcaccaggtaacatataaaggaaaacctatcagattaacagaagatttctcagcagaaaccctacaaagtagaagggttttgggtcctatcatcagcctcctcaaactaaacaattatcagccaagaattttttaaccagcaaaactaagcttcgtaaatgaaggaaagatactgtgtttttcagacaaagaaatgctgaaaagaatttgccactaccaagtcagcactacaagaactgctaaaaggaactctaaaacttgaaaccaatcctcaaactacaccaaaatagaacctccttaaagcayaaacctcacaggacctataaaacagcaacaatgaaaaaaagccaaggtattcaggcaacaaacagcacaatgaatagaacaataccttacatctcactactaacatttaatgtaaatggcctaaatgctccatttaaaagatacagaatagcagaatagatacgaattcaccaactaagtatctactgtcttcaagggactcacctgatacataaggactcacataaacttaaggtaaaaggggggaaaaagatattccatgcaaagggacaccaaaagtgagcaggagtagctattcttatatcagacaaaacaaactttaaagcaacagcagttaaaaaaggcaaagaggaacagacattatataataataaaaggactaatgcaacaggaaaatataacaatcttaaatatatatgcacctaacactggagcccccaaatttataaaacaagacctaaaaaatgaggcagacagcaacagaataatagtgggggactttaatattccactgacagcactagataggtcatcaagacagaaagtcaacaaaggaacaatggacttaaactatacctagaacaattggacttaacagatatttacagaacattttaccaacaactgcagaatatgcattctattcatcagcacatagaatgttctccaagatagactatatgatagacaaagtccaagatagacaaaacaagtctcaacaaatttaagaaaactgaaattatataaaatactctctctgaccacagtggaataaaatgggaattcaactccaaaaggaaccctcagaaccactcaaatacctagatattaaataacctgctcttgaatgatcattggatcaacaatgacatcaagatagaaatttaaaaaaccttttgacatgagcaataatagtgacacaacctatcgaaacctctgggatacaatagtggtgcaaatgtagcaggacaagctacagacaaaaccctttagacactgagttaaagaagtaagggctttattcgactgagagcttcagcaagactcatgtttccaacaaccgagctccctgagtgagcaattcctgtcccttttaagggctcacaactttaagggggtccacatgagagggtcgtgatcgattgagcaagcagggggtacgtgactgggggctgcatgcacyggtaattagaatggaacagaacaggacagggatttttacagtgcttttctatacaatgtctgtaatctatagataacataactgattaggtcaggggtcaatctttaactaccaggcctagggtgtggcaccgggctgtctgtttgtggatttcatttctgccttttagtttttacttcctctttctttggaggcagaagttgggcataagacaatatgaggggtggtctcctcccttattcccccactttgagaatctcactcaatagtgggagttctcactttcattctcactacctatgtcttcttgcaagacagatcgatagtgattcatatagtacacttgtgccgaagtattttggtgaactaaggtagcaatgaagctttttatcatttgaagaagtrcaggtagcaaggaagcagtaagcaggtttctattactattataactcctattataagagttttaaatctttttagcactgggaaccactttccaaacatggccccaggatcgaatccatgccacacttgcacgggcacatgtgccagttttgtcatatttctaactatgtcttcaactacttgcctttgatcgtctatgtgtagacagcaattagtaaggttaaattttctacagacccctccttcagttgctagcaagtagtcgagagccaatctattttgatagatagcatttctcatctgagtttcttgccaggcaagaatagtcaaggctctgctggtcttattagtgattatttctaagacagcttgtaaccatatgattcagttgagcatgtaaatgggggtcgggtatccccacgagctgtcttgtgccaaagtaycaggaccatagtattgtatgattctctcagggggccatgtatcatcttttaaattttctatagctatgcttctctttttgtgggaagcacagacagggaagcccaggagttcacctgtctttgtaggcagtaggaagaaagatggtttaatagtgccaataacacaactacctgcccactggtcrggtattttggtgtaagctctatgcccacaaatccagtataatccagtgggggctgtccagtccyggtgggactctgggtgggttcacagagtttgcaactttgggaatttactaaatggatttttcttagtgtggtttgaactccactaggtggctgtttttgtagtattactatacagtttttgcccgaggcagctgagtcttcccacaggaaaggtgaagtcctttccgactcttgctatacagtattgtctaatgattgaggcttttaggacccaaaagttatcagggtgattcttttgagccaggaattcatcaggaactgggtctgtaggtactaattattgggcttcctatggccattgatctcccattacagttcctctacatacataacaggaagtgacattgagagactgggctacatgctcagctaattgcaaaaacaaatttcttgtttttcctggaatttctggtactggcacattcagtttatcatagaaggtttgaaatactggctcaggagcacgtttataaacttctcctcaaaccacgatatttactcaaggatccagtccaaccccatcgattcctaggtctacacactccccttttttccagcaaggatcaagggggttggttattactagctttaaggggttacactgaccactggtacaggaagggccacttttccttttctgaaggtggacagcatcctttttattttttatccaagtagcctaaatgacacaagaccagcatccacattcatttccacacagtcctaactcatgacaaatgtacttattttctgccatatagcctctttcctaattaaaagaaccacatcttattcctaacattactattaataacagcacaggcatcaaacttcaaggtgacttgtttgggcacccctttttcttttgttttggctaacacattactcatatcatttatgagcccccaccagtcctcagaccttaatcttacttcaaaaactgtggtcatgggaggctcagatggatcataacacacatcaggttggtcatttcctgggctacataccttgcataggatagcatgatacaaacaagttttttttagattcccggtacacttataataatcataaaataataggactgtagcacatttttgtcctacctcagtaacttgatgtatacactgggaacagtcctcattctgaggaaggtcagttaataagtccttactgtacaagtctgaattttaaggaaaatgagtccccgcaatgagttttctcatgcttcggctgtgcgtggaccagtcagcttccgggtgtgactggaacagggcttgtcgtcttcttcagagtcactttgcagggrttggcacagctgctcctgtccgcgtaccactcacagtctactgatgttcaaggatggtttcagaggttgggcctcctagcataaactgagtccaacacctctacacagttatgcttgaccgggctctctgatactgggagcaaggtggcgggatttagggtgttgcaaacttcaatggttatgyggagattttcacatagcaagctttggtacttggttaatctagcatttgttaaccaataatgtcctttggttgtcattaaagttaccacagcatggggggcctttatattcagattttgcccaagggttattttgtctgcttcttgtgctaacagggccattgctgccagggcccttagacatgggggccagactttggaaaccctgcctagttgttttgaaagctaggccactggccttggccagggccccacagtctgggttaaaagtccaactgccatttttttctctttctgatacatagggtgtaaagggttttgtcgggtcaaatagccccagggctcgggctgacatgagtttttcttttaactcgtgaaaaggtaattgctgttggttgtaatagatgtagtttatccaatttacatttttattaactgtcacctaccaaaatattgactcaaatcctgcagctatttgatttcaagcttttaattaatctggtattctctgtgggactccaattgcrtctaaatggatgtgagagtcaaaagacccataaggggcttctcttgtgttacgatgtcttatttttcctccctatggttgatgaaatgccagggtgaaagggatagccaattggactaatgtacaagtgccactccagttatttggcagagtgcccagtgaaggtctaccacaataccaccacacatctgctcagggatgaacaagggctgactgattagtaagctcttgaaaatgtttaagctcactgcatcctttcaggtctccaaggaatgctaagtttcctccctgtcatgagagacacaaagtgaacttatgttgggagacggaggttggatggcccttgggggctgacccgcagggtgccagactttgggatacagcagagagagcttggcatgacttattactccaggctgtagaatcctggaaaagggttaccatgcagcccacacctggtygactggaggaccaccttagtggaaaggggacaatctgggcctctggcttgccatgtgcacaagcataacaattgcttttttttaacgtgtggatggaatatttgatccattccaaccaggcatttgcawcttggtatgctgtcttaattgccaaagtttgttttaagtctttaacttctatgatcctctagtaaaatgaatgtatgattttgggaaattaaaaaaactggttggggcagtccatccttgctctctagtggtccacagaatgttgggccaactatggcataaaagctctacatttggggagcaagactcctggttgacattggagtctttattgaaatttccccagattaaatggtcctaatttactaatgcccagtctgaggagagtcaggagggacagaggwacttttctgaagtagagagctgtctttgacttggcaagtccccacagggtataacaaggcaagcattaaatacaatagtttgaggcaaaatcgacttggttatgttaataaccagacggtcagcaatagaacgaggaaagaagaaagagcaatagaatagatgaaagagttaaatttttcttagctttagtttggtagggttttcccctgagactgcagtctaggagtctggagggggtggcgctttaactcaggtgtgatgagtccatcccttttctgctgtacgaacagcagtctcggaggttagcagcacaaggtagggtccttcctaggctggctagagtttttcttctttctgccctttgataagaaggtgatcttcaggctggtgctggtttactggaaattctagtggtggtacctgtgctaaaagacttttagttttgagggaaaggaaagtggaagataaacgaagtatataatttctaagaaattgactttttgttttaaatgtggggacatcaacagtggactttgtagtctttggtgccttcttactgagaaatttcctttagcacctatttttattagtttctagaccaaagaaacccaaacaccattttatatttaataatgcttcttgtatgatttttatgccagataagctaaatttcacctttatattagtatrctattaatgttaaacttagttttagtaaaactttgtatacgtatttattcagtttttaatgtcggaccataaggtaagatttttatagactctttttaaccttttataatctttgttaaagagcaggttagtgctttaagaaaaacccattgtgtttttactttaatgtccagttcacagaaaaactggatgatacccctttaacattagctaatatgtttacacacagattttttttataattaacattttaaaacttgccaaaaccttcaaaacaattttttttaaccttttaatgtaggtaaaaatttacattcttatgcctccttctaatctttttaccaaaggcatattttacgttccttatacaccttgcacataaactttttttttccaatagttttacatttaggaagcctagttagttttaaattatacaacatttcttgcataaattcttttttataacatttttctctttcacgactttcacagacaattcttcgacatgccttaactttctgacttattacaaacatttctttctttaaacaaccagttaatgtatttcaggataagaatttaccatataacactctttttactaaattctgcagcccctctttcccccgcttttttttttttttgaagatgataaccattcttttccaaagtgaacttcttttatgtctgtggactagactgtctaaggccacaagattagaaattactataatatatgttatattgttaacttttagcaaactttacttttgttgaaaaccttgtaagtttgggattttaattatcctttgctattaatcagaccttgttttgtccaaattaacttagaattggtatagatgactttttttttttttccttcagttacctgggaggaaccattgattgtcctgtcctgaagggagttcctcctaggtctggttggaactttgtatggtaattaagatttagwtcccctgttaggaaacctgctgggttaagggaattttcagtggttaatgttaaatcatccttttcttttattgccttaggatacttctcaactggtgaggtgtgctcacaatgaggtttcctctaaaagttatttttttacttttttctgttagcaaagctcttgctgctatagattgaatgcatttgggccatccaggggttactgggttaaggatttttgataggaaggcttcagtgctttctggatatgcccttgtttacactgacaacaaagtggtattggagtgttatagggttacagagaataccttcaattaccaattataggtttttaatttaccttggctyttaaaggaatagggtacactytttttttcttaactacttgtatctctctctctctctctttctttctctctctctgtctctgattttctgtctctttttctctttgactttccttttacctctgtctctttctctctctctgcctctctctttctctctctctctgctgatctttccttacctctgccagctgcttatgctgctgctctctcaaccactgtggtgggggttggtggtggaggggtctaaaaccagctgtaaccaagtgtctatatatgggaactggtctgggtaccttggcttacaggttaccttgtgccatacctttgaaacaagggacctgtccaggcttccttctgatggccaacccacctctaatgctggccagtctatcttacaaaaagttttaacttttcctggtgtaatagtactccatcgtctcccttaaatcctttcttgaaatttttcaacatagttcctagtggagtgggcttactttgtgcctgacccatgcttcttcaagacaaaacaccacgcttacatcacacacacaccacaaaacaaagaatgggtaaaaagggcacataaacacttttacagtttacaccaaagcagaatcaaaaccaaaatcagagtatcaagaaatccaagccaggtcaaaactaaaaccaaagtatcaagcaatccaagtcaagtcaaaaaaaagaacyaaagtgctggtacaggcacaccatgggtgatcaggccacgcttccactcaaatggagtaggcaagttccaaagactagtcttaccaactttcagatgtctggactccaggtgccatttccttcccrgtgttcagccactgcattgatcctccacaggggcctgccatgcgctgctctggcaaggcattccactggggcaattgcctacttgggagcactctcaggatctgtgtcactcaagctggccagagtcccccgcagggatgctccacagggcaggcctaagccgcctaaggggctgcctcgactrtctgttaatcaccttgcttcctggtcaaggaaccaagaaatgtagcaggaaaagccacagataaaacccctcagacactgagttaaagaaggaagggttttattcggccgggagcttcggcaagactcatgtctccaacaactgagctccctgagtgagcaattcctgtcccttttaagggctcacaactttaagggggtctgtgtgagagggttgtgatctattgagaaagcagggggtatgtgactgggggctgcattcactggtaattagaatggaacagaacaggacagggatttttacagtgcttttctatacagtgtctgtaatctacagataacataaccgattaggctggggttgatctttaactaccaggcccagggtgtggtgccgggctgtctgcttatggaattcatttctgccttttagtttttacttcttctttctttggaggcagaaattgggcataagtcaatatgaggggtggtctcctcccttactaagagaaaagtttaaacatttaaatgcctacatcaggaattctgaaaaagcatatatagacaatctatggtcatgcctcaaggaactggagaaacaagaacaaatcaagcccaaactcagcagaagaaaggaaataaccaagatcagagcagarctaaatacaactgaaacaaaaatatacaaaagataaatgaaataaaaaactggttctttgaaaagacaaataaaattgatagaccgttagggagattaaccaagaaaataagagaatccaaataagctcaactagaaaagaaacaggagatattacaactgataccatagaaattcaaaagatcactcaaggctactatgaacacctttacatgcataaactagaaaacctagagaagattgataaattcctggaaatatacaatgctcctagtttaaagcagaaagaaatagaaacctgtacagaccaacagcaagcaacgagattgaaatggtaataaaaaaattgccaacaacaacaaaaaacccagggtacacagctgaattctatcagacatgcaaagaagatttggtacccatgttattgacactattccaaaatacagagaaagatggaatcctcctcaaatcattttatgaagccagtgtcaccctaataccaaaaccaggaaaggacacaacaaaaaaagagaactacagaccaatatccctgatgaacatagatgcagaaatcctctatgaaatactggtgaatggaatccaacagcatatcaaaaataatctaccatgatcaggtgggtttcatacaaagtatgcagggatgttttaacacccaacagtaaataaatgtgatacaccacataaatagaattaaaaacaaaaattacatggtcatttcaatagatgcagaaaaagcatttgacaaaatctagcatccctcagtaaaatcggcatagaaggcgcataccttaaggtatgacaggccataccttaagatatgtcaagccatctatgacaaacccacaaccaacattatattgaatggggaaaagttgaaagccttccccctgagaactgaaacaagacaaggatgcccactttcaccacttctattcaacatattactggaaatcacacaagggaaagaaatcaagggcatccaaattggtaaagaggaagtcaaactgtcactgtttgctgatgacatgattgtatacctacaaaaccctaaagacacatctggaaagctcctagaactggtaaatgaattcagcaaagtttcagaatacaaaattaatatacacaaatcagtaccatttgtcataccagtacccagcaccttctgttgaatagggtattctttctacactttatgtttttgtttgctttgttgaagattagttgactgtaaacatttggctttatttctggttctctattctgttccattgctctatgtgcctttttttatactagtaccatgctgttttggtgactatggccttatagtatagtttaaagttgggtaatgtgattcctccagatttcttctttttgcttcaccttgctttggctatgtgggatcttttttggttccatatgaattttaggattttttttctagttctatgaagaataatgttggtattttgatggaaattgcattgaatgtaaaaaaatgaaactgaatcctcacctctcactgtattggtccattttcctgctgctgataaatacatacctgagactggacaatttacaaaagaaagaggtttaatggactcacagttccatgcagctggggagacctcacaatcagagcagaaggtgaaagtcacatcccacatggcagcagaaaagagaagagaatgaaaatcaagcaaaaggggtttcctcttataaaaccatcagttattgtgagacttatttactactatgagacagtatggaggaaagcacgsccatgattcaatgatctcccactgggtttctcccacaacatgaattataggagctacaattcaagatgagattcgtgtggaacacagcaaaaccatatcgctcaccttatataaaaatcaactcaagatggatcaaagtcttaaatctaagacctgaaaccataaaaattctagaagataacattggaaaaatccttctagacattggcttgtgccaagattttatgatcaagaacccaaaaacaaatgtatcaaaatcaaagataaatagatgggacttaaataaactaaagttactgcacagcaaaagaaataatcagtagaataaacagacatcccagagagtgagataaaatcttcataatctatacatctgacaaagtattaatatctggaatctacaaggaactcaaacaaatcagcaagaaaaaaaatcccatcaaaatgtgggctaaggacatgaatagacaattctcaaaagaagatatacaaatggccaaaaacatatggaaaaaaatgctcaacagcactaaggatcagggaaattcaaatcaaaaccacagtgtgatatcacattacttctgcaagaatggccatagtcaaaaaaataaaaaaaagtaatggrtgttggcatggatatggtgaaaagggcacacttttaaactgttggcggaaatgtaaactagtacagcctctatggaaaacagtgtgaagattccttaaagaactagaagtagaactaccatttgatccagcaattccactcctgcgtatctacccagtgaaaagaagtcattatacgaaaaaagatacttgcacatgcatgtttatagcagcacgatttgcaattgcaaaaatatggaaccagcttaaatgcccatcaatcagagtggaaaaataaaatgtgagatagatatagatatagacatagacatagatatagacatagacatagatatagatatatagatatagatgtagatatatatgtgccatggaatactactcagacagaaaaagtaatgaaatagtagcatttgcagcaacctggatggaattggaaactgttattctaagtgaagtaactcaggaatggaaaaccaaayatcgtatattctcactcataagtgagagctgagctatgaggatgcaaatgcataagaatgatacaatgaactttggggattcaggggaaagggtgggagggaggtgagggataaaagactacacattgaatacagtgtacactgctcaggtgatgggtgcacaaaagtatcagaaatcaccactaaagaactcattcatgtaaccaaataccacctgttccccaaaaacctattgaaataaaaataaaacattttgaagactacctctataaagtaccttttccaagatgtttataccagatatatcttaatctctaaattgtattagatggcatagattctaataagctttgataagcttggaatttgttcctttcatcctactctccaaagaaaatttactctttttttttgttttgttttattatactttaagttttagggtacatgtgcacattgtgcaggttagttacatatatatacatgtgccatgctggtgcgctgcacccactaacccgtcatcttgcattaggtatatctcccaatgctatccctcccccctccccccaccccaccacagtccccagagtgtgatattccccttcctgtgtccatgtgatctcattgttcaattcccacctatgagtgagaatatgtggtgtttggttttttgttcttgcgatagtttgctgagaatgatgatttccaatttcatccatgtccctacaaaggacatgaactcatcattttttatggctgcatagtattccatggtgtatatgtgccacattttcttaatccagtctatcattgttggacatttgggttggttccaagtctttgctattgtgaataatgccgcaataaacatacgtgtgcatgtgtctttatagcagcatgatttatagtcatttgggtatatacccagtaatgggatggctgggtcaaatggtatttctagttctakatccctgaggaatcgccacactgacttccacaatggttsaactagtttacagtcccaccaacagtgtaagagtgttcctatttctccacatcctctccagcacctgttgtttcctgacttttgaatgattgccattctaactggtgtgagatggtatctcatagtggttttgatttgcatttctctgatggccagtgatgatgaacattttttcatgtgttttttggctgcataaatgtcttcttttgagaagtgtctgttcatgtccttcgcccactttttgatggggttgtttgtttttttcttgtaaatttgtttgagttcattgtagattctggatattagccctttgtcagatgagtaggttgcgaaaattttctcccattttttaggttgcctgttcactctgatggtagtttcttttgctgtgcagaagctcttgagtttaattagatcccatttgtcaattttgtcttttgttgccattgcttttggtgttttggacatgaagtccttgcccatgcctatgtcctgaatggtaatgcctaggttttcttctagggtttttatggttttaggtctaacgtttaaatctttaatccatcttgaattgatttttgtataaggtgtaaggaaaggatccagtttcagctttctacatatggctagccagttttcccagcaccatttattaaatagggaatcctttccccattgcttgtttttctcaggtttgtcaaagatcagatagttgtaggtatgcggcgtcatttctgagggctctgttctgttccattgatctatatctctgttttggtacaagtaccatgctgttttggttactgtagccttgtagtatagtttgaagtcaggtagtgtgatgcctccagctttgttcttttggcttaggattgacttggtgatgcgggctcttttttggttccatatgaactttgaagtagttttttccaattctgtgaagaaagtcattggtagcttgatggggatggcattgaatctgtaaattaccttgggcagtatggccattttcacgatattgattcttcctacccatgagcatggaatgttcttccatttgtttgtatcctcttttatttccttgagcagtggtttgtagttctccttgaagaggtccttcacatcccttgtatgttggattcctaggtattttattttctttgaagcaattgtgaatgggagttcactcatgatttggctctctgtttgtctgttgttggtgtataagaatgtttgtgatttttgtacattgattttgtatcctgagactttgctgaagttgcttatcagcttaaggagattttgggctgagacagtggggttttctagatatacaatcatgtcttctgcaaacagggacaatttgacttcctcttttcctaattgaataccctttatttccttctcctgcctaattgccctggccagaacttccaacactatgttgaataggagtggtgagagagggcatccctgtcttgtgccagttttcaaagggaatgcttccagttttttcccattcagtatgatattggctgtggatttgtcatagatagctcttattattttgaagtacgtcccatgaatacctaatttattgagagtttttagcatgaagggttgttgaattttgtcaaaggctttttctgcatctattgagataatcatgtggtttttgtctttggctctgtttatatgctggattacatttattgatttgcatatattgaaccagccttgcatcccagggatgaagcccacttgatcatggtggataagctttttgatgtgctgctggattccgtttgccagtattttactgaggatttttgcatcaatgttcatcaaggctattggtctaaaattctcttttttggttgtgtctctgcccggctttggtatcagaatgatgctggcctcataaaatgagttagggaggattccctctttttctattgattggaatagaaaatttactctaagtgttgttacaataatactgcagaaggcatacagcttctcctgtatttagttttctcttaatagagaataaaaatccaacctagttatgacatcaaccataccactattgaaaatatgtaatatctgcttcagaatgctgacataagcaatttttatgttttaatataatgtccgtatgaaatcctagtgtagtattagtattgtcagttataaggttggttaatatgtggtgcaatgggggcatatgaaagttataatgtagcataacatcttatttttacgaaaacaattatagtctagtcaggagaaaactacctgtacacccaccttaatgataagctctcctatgtatcaatgtacaatatttaattttaaaatatataaaaaatacataaatagcaccaaaatacataaaatcattatgataaatgcatatggtatattctatcagtaaatctgatgccagatttactttttttagggtactgtaaattattacatagaaaaattataccctttgaaaagcttttgctctgtcatagtgatgtgtgattggacttaatgggcccaattattaaatatctggatttaggtatgagytgtattttataaggaccctgtatacaagtatatcaattatagtaccttaagagctaaccaaaaaatcattaacctacagaagcatgattatgatctaagcaaaaaatgggcttacttaagtaaaaatgcagcatattataaacaactttttacaaatatgtcacacgttaaaattaacatagtttacacaattaattacaaaacaccatacaaactgcctctgtatataaccaattggccaactggatatatatgtgtatgatgaactaattattgagaaaggatggtacatatgtgagcatgctgcaaaatcccaccaggtatgattcaccagcctcctgaaaggcatccatcactgccttaccaaacctcaagcctgttttgaggccccagagagcagttgtcatattagatgctttgttcatgtctggtaatgacaacaattctgggtctgtgaggaggctttgtagtgctttggctgagagtgttgctctttgtgtctgccttaattgccagctatttgtgaggagctttcctagagtggatttatgagcactgggcttactgagcagtttgtttggacagaacattttcttttgcccaatgttaaacttttaactacttcactgccaacattaaacattaaaaccattaacataaaaaaatttaagtaactcagtgaagaaaatcttcttcaacaatggctaatctgtgcatctagtattagatttttgtctttctcaaggaaacattattagtgactatactatatattaaaattaaattgaatatatacatttccaaaaagcataacatggaaatcaaggcatccatcaaatttatgtactgaaccaaagtcttgattttcagaattcactggtcagtcatgattctagaccaaggctgtcaaaacatgtttttatttttatgtatttatttatttagtttatttaatttttaattttttattttaagttcaggggtacatgttcaagtttgttatataggtaaacttgtgtcatggacatttgttgtacagactattatctcactgaggtactaagcctagtacccaatagttattttttctgatcctttccctcttcccacccctcacatttgagtargctccagtgtctgttgttccctgatatgtgtccatgtgttcttatcatttagctcccacttataagtgagaacatgcagtatttggttttctgttcctgcattagtttgctaaggataatggcctccagctccatctatgtttctgccaaggacatgatctcattcttttttatggctgcgtaatctacagtgtacttataatgcttcttttttwaaaaaaaaaaatccaatctactattgatgggcatttcagatgactctgtgtctttcctattgcgaatagtgctgcaatgaacatattcattcatgtctttatgatagaacaattcatattatttgagtatatacccagtaatgggattgctgagttgaatggtagttctgtttttatgtctgtgaggaatcgccatactgttttccaccatggttgaattaatttacactcccaccaacagtgtataagcattcccttttctctgcaatcttgccaccatctggtttttttttttgacattttaataataactgtatgggtatgagatgttatctcatgtggttttgattttttttttttagaggtagtcttgctctgttgcccatgctagactgcagttgcataatctcagctcactgcaacctccgcctcctgggttcaagcaattctcatgcctcagccttgcgggtagctgggattgcaggcacatgmcaccacacctggctatcttttttgttttgttttgtatttttagtagagacggggtttcaccatgttgggcaggttggtcttgaactcctgacctcaagtgatctgcctacctcagcctcctaaaaagctgggattacaggcgtgaaccaccacacctggccattgagcagttktttttttcctatatgattgttggctgcatgtatgtcttcttttgagaagggtctgttcatgtcctttgcccacttttaaatggggttgtttttaccttgtaaatttgtttaagttccttatagatattgaatattagacccttcttggatgcatagtttgcaaaacttttttcaattctgtaggttttcagttcactcaattgatagtttctttcactgtgtagaaactctttagtttaactagatgccatttgtcaatttttgcttttgttgcaattacttcctgtgtcttcgtcatgaaatcattgcctttttgtagatccaggatggtattgcctaagttttcttccagtatttttatacttttggatttcacatttaagtctttaatccatattgagttgatttttgaataaggcgtaaggaaggggtccagtttcagtcttctgcatatggctagtgagttatcctagcaccatttattcaattaggggattgtttgtttccccactgcctgtttcatttttagcttgttgaagatcagatagttgtaggtatgtggccttctttttgggctcattatcctgttatattggtctatgtgtctatttttgtaccagtaccatgctgttttggttactgtagcttgttagtatagtttgaaatcaggtattgtgatgcctccagctttgctctttttgctttggtgaactatttgggctctttttggttccacatgaattttaaaatagtattttctatttatttgaaaaatggcatctgtagtttgataggaatagcattgaatctatacattgctttggactgtatggccattttagtgatattgattctgtctattcatgatcccatatttgcatttgtataatctctgatttctttggcagtgttttaggaatggaatggaatggaatggaatagcattcctgatttagctcgtggcttaactgttgttggtgtataggaatgctagtgattttcctgagactttgctgaagttgcttatcagcttaagagcttttgggctgacactgtgtggttttctagatataggatcatgttgcctgcacacagggatagtttgacttcctctcttcctattcatattccctttttttatttctcttacctgaatgctctggccagaacttccaatactatgttgattgggagttgtgggagagtgcatcctcttctcgtgctggttttcaagggacaaaaggtggtttccagtttttgcccattcagtatgatgttggctgtgtgtttgtcatagatggctcttattattttgagatatgttacctcattacctagtttattgagagtttttaacatgaaggagtgttgaatttcactgaaagcctttcctgcatctattgtgataatcatgtggtttttgtctttagttctgcttatgagatgaatcccatttattgatgtgcatatgttgaactgatcttgcatcccagggataaagccaattttatcatggtggataagccttttgatgtgctgtggaattcggtttgccagtattttgttgatgatattttcatcagtgttcatcaaggatatggcctgaagttttctacttttgttgtgtctctgtcgggttttggtatcagggtgatgctggcctcgtagaatgagttagggaggagtccctccttctcatttttttgcaataggtttagtaggaatkgtagcagatctttgtacaccttgtagaattgggttgtgaatctgtctggtcctgtgctctttttttatggaggatgtggctggtaggctattactgattcaacttcagggctttttattggcctgttcagaaatttaattttttcctggctctgtcttgggagggcgtatatgtccagaaatttatcaatttcctctagattgtctagtttatgtgcatagaggtgttaataatattctttgttggctatctgtatttctgtagggtcaatggtaatrtcccctttgtcatttctaattgtgtttatttggatattctttctttcttctttattaatctaactagaagtctattttattagttacttcaaaaaacaaacccctggattcattaatcttttgaatttttttttgtgtgtgtttgtgtttctcagtctccttcagttcagctctgatttttttttttcttctactagctttgggattgtttttttcttgtgcttctttagttcttttagttgtgatgttaggttgttaaatggagatctttccaactttgtgatgtgggcattttgtgctgtaaactttccttttccctcttcatactgccttagctgtgtcccagagattctgtaatgctgcacctttgttctcactggtttcaaagaaggccttgatttatgccttaatttcattatttaccaaaaagtcattcagaagcaggttattcagtttccatgtaattgtatggttttgagtgaatttcttagtcttgatttctaatatgattggactttgttctgagagactgttatgatttcagtttttttgcatttgcttagcagtattctgtgttcgattatgtggttgattttgatgtacatgtggtgatgagaaggatgcatattctgttgttttgggtggatagttatgtagatttctatcaagtccattttatccagtgctgagttcacatgttgaatatctttgttcattttctgcctcagtgatcagtctaatactgtaagtgggatgttgaagtattccactgttattgtgtgggagtctaaaagtatctttgaaggtctctaagaatttgctttatgaatctgtgtgctcttgtgttggatgcatatatatttgggatagttaggtgctcttgttgaagtgaaccctttgctattatgtaataccttttctttcttgatctttgttggtttaaagtctgttttgtcagaaacttggattgcaacccctgcttctttgtgtttccatttgcttggtagatttttttcatccctttattttaagcctgtaggtgtcactgcatgtgagataggtttcttgaggacagcatgccaacagggtcttggttccttacgcagcttgccactttgtgtcttttaaatgggggcctttagcccatttacattcaaggttagtataggtatgtgtggatttgaatctgtcatcatattagctggttattatgcagactcgttagtgtggttgctttatgttgtcattagtctgtgtacttcagtatttttctggagtggctggtaatggtctttcctttccatatttagtgtttccttcaggagctcttgtaaggcagttctggtgggagcaaattcccttgacatttgcttatctgaaaaggatcttatttttcctttgcttatgaagcttagcttggccagatatggaattctgagttgcaatttatttyctttaagaatgttgaacttgggtggctgaagtgcgaggatcccttgagcccaggaattcaaggttgcatgtagctatgatcatgccactgcactccagcctgcatgacaaagtgagaccctgtcaaaacaaacaaacaaacaaacaaaagaatgttgaacattgcctggcttgtagggtttctgctgagaggtccactgttagtctgatgggtgtccttttgtaggtgacctgccctttctgtctagctgcatttaacatttttttcttttattttgaccttggagaaactgatgacacagaagtatagagctgtgaaatgggaaatcaggggtctcacagccttcagagctgagagccccaaacagagatttacccacgtatttattaacaacaagccagtcattagcattgtttctatagatattagattaactaaaagtatcccttatgggaaatgaaggaatgggccaaaataaagggatgggttgggctagttatctgcagcaggagcatgttctttaggcacagatcgctcatgctattgtttgtggtttaagaatgcctttaagtggttttctgccctgggtgggccaggtgttccttgccctcattccagtaaacccacaaccttccaatgtgggtgttatggccatcatgaacatcacagtgctgcagatattttgtttatggccagttttggggccagtttatggccagatttttggggcctgttcccaacatccagtatccctggtggttgaagggtctctttctgttggaatttcagaggcccgtggtgacaggaggttgctccttgtcggttcaactcacccattccccttaatttgttggggaccaggaataagtccgagtgcatggtagccccttgtagagtccccagagtcttcccccttcaacccagcttttgtgtcttccttccatctattctcagtatcttccmtttgaatactttttaggagcatgccatttgtgtcagtacctcagtggcatctgttccacctggctgtgtctggtcagccactttacttaacaagtgtttataaatggttaagatttcttgttcataaatggaacagaccatcctctatgtgataattactttcacataatcattttggggtcctagatattttaattgttgttctacttcatcatgtgaagatatgcatgattctcagccagagaaaaatgtgaaaccaagcaggatctagaccctgacctcatagagcatggcctggccaaatcctatggttccagagcagaaaggacacactcttctaagatttttaaaatttaaattaaaactttatatttagtaaaattctctcataatgtagtgtttttatgagtttacaaaatgagtcatatatctaccataacaatcaagataaaaattaaatcacctcacaattatcccttatgctgtccctttgttgtcaagcccttctcccaccttcgtcacccttggtaaacactgccactattttctacgtttctaagctttatcttcttcacaatggcatataaatagaataatacagtccatactcctgagaaacaaacacatcaaacaaaccagattctgataatgatatagatgttggaaatgcctgaaagggaagtaaaaataactatgattaaaatgttaaaggctctaatagaaaaggtgaaccacctgcaaaataagatgggtaatttcattagagagattaaaactctaagaataaaatggaaatgctagaaattaaaaacacaataatagatatagtctctttattggccttatcaggagacttgacacagctgagaaaatcattagtgaccttaaagatatgtcgataaaactcgtccaaactgaaacactaggaaaaagaaaaggaagaaaatgaaatatatcatccaggatctgtgggataatatcaaactccctaatataaatgcaattctaattgtataaggaaaagaaatatgtgacagaagaaagacttcaaataaaatggctgataattttccaaaattgttgacagatattaaaccacagactcaaaaaactcaaarcaccacaacttggctaattattaaaaaaaaaaaaatgcacccaccccagacatacaaygtaaaatctactgaaaaccaaagacattcagaaaatcttaaaaaaacagagaaaataaaatgaaatatagaaagaaaagttatagcaattttttcatcagaagccacagaagccagaagttaatgttacaaaaatcttttacatgctgaaagaaaaaatagtttactcagaattctgtacactgaaaataaaaagaaaacacaaacaacattttcagaaagaaaagtctatgaggattcattccctacatacctatactacaaaaaatgttaaataaattacttcaggatgaacatccccaatacacatagtcatcagatcctgcaaggtcaacataaaagaaaaaatattacaccaggcccagtggatcatgcctgtaatcccagcattttgggaggccaaggcaggcagattgcttgaggtcaggagtttgcaataagcctggccaacttggagaaaccccatctctactaaaaatatagacaagcacttagcatttgttaagggaattcattaccaccacacctgtctcacaagaggtccttaaggaagtgctaaacatggaaataaaaaaccactaccatccacgacaaacaccaacttacatgaatagtccatggacactattaagcaactataggatcatgcctaaataaaaaccagctaacatcatgatgataggatcaaatctccacatatcagtattggccttgaatgaaaatgggctaaacacctcaattaaaaggcatggagtggcaagttggataaagaagcaatacccaattctatgctgtcttcaagaaacccaactcacatgcaatgacacccataggatcaaagtaaagtgatggaggaagatctatcaagaaaacagaaaacaaaaaagagctgaggtagctattattattcaagataaaacagactttaaaccaacaacaatcaaaaaggccaaacaggggtactatataatgataaagggtttaattcaacaggaagacataactatcctaaacataaatgcgttcaacattggagcacccagattgataaaacaagtttttagagacctatgaagatacttagataaccaaacaataatagtgggagactgcaacaccccaatgacaatgttggacagattatcaagagataatattaacaaagatatttgggacataaacttgacattcaaccaaatttcattcacaatagccacaaaaagaataaaatacttaggaatagagcaattcagggaggtggaggatgtctgtaacagaattacaaaacaccactcaaagaaatcagagatgacataaacaaatggaagaggattccatgctcatgggtagaaagaatcattattgttaaaatgaccataccacccaaaacaatttgtagattcaatggtattcctatcaaaccactaaggacattcttcacagaattagaaaaaaaactattttaaaatatatatgagccaaaaaatagcttgagtaggcaagacaatcctaagcagaaaaaaaaaaaaactgaaggcatcacattacccaactttaaactatactacaaggctatattaaccaaaacagtggggtattggtacaaaagcagacacatagaccaatataacaggttagagaatgaagaaataaagctgcacatgtagaaccatctgatcttttttaaatatgacaaaagcaaggaatgggaaaagaagttcctaatcaataaatgatgctgkgataaatgactagcaatatgcagaagattgaaactggaccctttctttaatcatatacaaaaatcaactcaaaattgattaaagacttaaatgtaaaacctaaaactataaagaccctagaagaaacctaggacatatcattatgcacataggccttggcaagattttatgagaaatactccaaaatcaattgtagcaaaaacaaacattgtcaagtagaatctaattaaactaaaaagcttctgtaccaaataaactaccaacaaaggaaacagacagcctacagaatgggagaaaatattttcaaactatgcatccaacaaaggtctaatatccagaatctataaagaacttaaacaaatcaacaagcaagaatcaaacaaccctatggacaaaagacacgaacagatacttcttgaagacatagacgttatattctgtggccaacaagcatatgaaaaaattctcaacaacactaattattagagaaatgcagattgaaaccgcaatgagatgccatctcacacctgtcagagyagctgttattaaatagtcaaaaaccaacaaatgccaatgagattgtggataaaagggaatgctcatacactgctggcagaaatgtaaattagtttagtcactgtggaaagcagtttgaagatttctccaggaacttaaaacggaactactgtttgacccagcagtctcattaatgggtatataaccaaggaaatacaaataattctatcataaagacacctgacgtgcatattcatcacagcacttttcatgatagcatgaacagtgtattgaataataaaaagtggtactattcactatggtgtactaggcatccatgaaaaagaatgacatatttttgcagaaacatagatggaactggaggccataatcctaagtgaactaatgcagaaacagaaaaccaaatactgcatgttttcacttataagtgggagctaaacttagagtacaagcaaacgtgtactcaaagttatgggtaacaatagacaccagggtgtacttgagggtggaggatgccaggaggctaaggatcaaaaagctagttaggtatttttgttgaattgaaccctttaccattatggaatgctcttctttgtctttttttgatcattgttggtttaaagtctgttttgtctgaaattggaatagcaactcctgctttcttcagttttccatttgcttggtggatttttatccatctctatactttgaccctatgggtgtcattgcatatgatatggatctcttttaaacagcatgcagttgaatcttgcttgtttatccaacttggcacttcgtgcctttgaattggggcatttarccagtttacattcggttaatattgatacatgtaggtttgatcctgtcattgtgttgttacctggttattatgcagacttgattgtgtgctttctttatagtgtcaatggtctacgtatttaatcatgtttttgtggtcattggtaagggtctttccttttccaggtttggcacttccttaatgacctcttgtaagccaggtgtgatgataactaattcccttagcatttgcctgcctgaaaaggatcttaggatcttatttctccttcttgtataaagcttagtttcactggttatgaaattcttggtttgaatttcttttctttaaagatgctttatataggcccccagtctcttctgccttgtagagtttctgctgagaagtacactgttagcccaatggggttcctttgtaggtgacctgcccctttcctctatctgcctttaacattttttcctcyattttgaccttgaagaaaactgaagactatgcacactaggaatagtcatcttgtatagtatctttcaggtgtgctatgcaattcctggatttgaatgctggcttctcaagtgagctaggtgaaattttcatggatattttcaagtgtgtttttcaagttgtttgctctctctctttttcagggttgtcaatgagtcatagatttggtatctttacataatctgatatttctcagagattttgttcatttatttttatttttgtcttaatgggttatttcagagaactagtctccgagctttgaggttctttcctcagcttggttgattctgctgttaatacttgcaattttattatgaaattattgaggtgaattattcagctctatcagattagcttggttctttcttaaaatgcctattttcttttatctcctatatcattttattatatcccttagatttttttaaattgggtttctactttctcctgaatgttgatcttcattcctatccatactctgaattttatttctgacattttacccatttcagcctgattaagaaccatggctggataactagtgtggtcatttggaggtaagaggacactctagctttttgagttttcagagtttgtgtgctgattctttttcatctgtgtaggctgatgttccttcagtctttgaagttgctgtccttcagataagtttttcttgcttttatattctttgattcccttggggatttgattgtggtgcaaggtgggttcagtagaatgtttttttttttttaagtgatcctcttaaaaatattttagtacatagaaagtcatttatacatattattaaagcaaattatgaaacattatgtgtagaaaacttccatttatgtgaaaaataggccaactgaggaccaattgtaaagaccatcaaggctaggaagaaaccgcatcaactaatgagcaaaataaccagctaacatcataaagacaggatcaaattcacacataacagtattcaccttaaatgtaaatgggctaaatgctccaattaaaagacactgactggcaaattggataaagagtcaagacccatcagtgtgctgtattcaggaaacccatctcatgtgcagagacacacataggctcaaaataaagggatggaggaagatctaccaagcaaatggaaaacaaaaaaaggcaggggttgcaatcctagtctctgataaaacagactttcaaccaacaaagatcaaaagagaaaaagaaggccattacataatggtaaagggatcaagtcaacaagaagagctaactatcctaaatatatgtgcacccaatacaggagcacccagattcataaagcaagtccttagagacctacaaagagacttagatacccacacaataataatgggagactttaacaccccactgtcaacattagacagatcaacgagacagaaagttaacaaggatatccaggaactgaactcagctctgcaccaagtggacctaatagacatctacagagctctccactccaaatcaamagaatatacattcttttcagcaccacaccacacctattccaaaattgaccacatagttggaagaaaagcactcctcagcaaatgtaaaagaacagaaattataacaaactatcactcagaccacagtgcaatcaaactagaactcaggattaagaaactcactcaaaaccgctcaactacatggaaactgagtagaatggttttgattctagtctactccttggtgtttaaataactccctctgattactgtctctgtgcctatgtttcttttgttgggtgttcttgtccatgaagctccctcaggcagaggctgcagttgcagacaggccatgtccttgccgggtcagctgtaatctgctgtcggagtatttcctgggggaacatggggttgtgcctgcccacagagtcccagcagaagtgggactgctgggttggaagctctagcaggtgtagcctgtctgtccatgagaggtggaggtggatggaattgattgccctgttgtctgggtgtttcctgggaaaacaggaagctgaataggactgagttcagacagaagtgagactgttgggttagaaaatctagcaggcattacctgcctggctaccagtggcaggagtgggtgggattgccctttctgccatctgggtgctttttaagacagcagggggctacagatgttggctgagtttaggtagaagtgagaccattgtgccagaagctggtgctaagccctgtctgatgaggggcagtagagcaatcttactccttctaggcaccatgactttagtctttattggggctgtggtgtcagtgctggtctattctgtggcctaagacttgtagagtttcccttggagtcaagagtttcccctgcaaagcatccaggtggtcctctgcctcagtctagaagcatggtgggggcagtgtgtgggggccagggtgattctgctgttcccagtcttgcataggctcctgtggaggatgtgagtatcccagaagattctcacttactcacctttcccctgttggagaggttcttctggctctttgctgtgcccatacaggctggtgctcagcttccctcttctctgatttctgtagccctgctaccttgatgaatcctgacatggtttctctgttgattggccttcagggccagtgtttattaaactttttgtttcttctctgtgagagtggagtacatgagctgcttctattctgccatattggcccctcccaccctctcatttttgaagggtcattttgtcaaatatagaattctttattgacgagtatttttttctttcagcactttaaatatgtcagttaacttatttctaacctccatggtctcagagaagaaattggctattaatcttattgagaatttcttttctgwgacaaatcttgttttgcatcttttcaggttctctttgtcttttttaaaatagtttaattacaatgtgccttggtgtgggtagagttttgctaatcctacttttagtcagctgagcttctcggatgtgtagatttacatgttttgtcaaatgtgagacatttttagccattattgtttcagatgttttttctcctttctctctcctccttctttgacttccataatacatatattaatccgcttgatgttgtcctacaggtcccttatgctctgttcacttttcttcattattctctccttctgctcctcatactagatattttccattgtcctatcatcaagttatctgattctgccttctgcctgctcaaatctgctgtttaactcttctagtgaattaaaatttcaattctccttttctattccagaatttgtttggttcctttttatttccatatctttatttatatttgaattttgttcagatatggttttaagtttttctttactttttatttatgttttcagttctttaagcatacttaagcagctgttataagtaattacatcagtgatatagtgggaacaaaagtcaagttacatgaaccaaaaagtaaaaaggagttgtgggaatgaaaatagggagtatcaacaacttttctcaaggcttgttttaaagggtattgaaaaatgggatattgtagttcgatagaaatgtgtgactaaggaaggttttttaaattgcatagtttgggctaactgtccaataccatagccaccagttacatatggctgtatgaacttaaattcattataattaaactaaattataaattaagttcctcagttatattagccacatgtgactactgtattggacagcactgaaaactcctctgatttgcaccatcttccctttcttttatccagttacaaataataaggcatcttttctctcattaaatattaattcctatcattcatactctggaccccattccctctccatttttttacttacctaagtcctatggttattatttctctctctctctcccacctaattatcagtctctccctctttgctagatcaacatgctctagtactgtagtaccacctcattcctggtttcactttctatgctttcaattattcatgttcaatcataatctgataatattaaatgaaaacttccagaaataaaccatttttaagttttaaactttgtataagtggtgtgataacatctcatactatcccacctgggatgagaatgtttcctttgtccagcatatccacactggatatgccacctgcccattcggcacttagctgtctcagttaccagatcaactgtcacagttttgcaattcttgcgttaatgtagcttttattttacttaataaaggccccaaagtggtagagtaatgatgctggcaatttgtatgtgccaaagagaagccgtaaagtgcttcttttagtgaaaaggtgaaagtttttgaattaataatgaaaaaacttgtatgctgaggttgctaagattgatggtaagaatgaatattctatctatgcaattgtgaagaaggaaaaataaattcatgcargtttttctgtagcacttcaaactacaaaagctatggccacaatgtatgataagtgcttagttaagatgaaaaaggcattacatttgtgggtggaagatataaacagaaatgtgtttcaattgacagtaatcggcttcagtactatctgtgctttcaggtttccactggttttggaatgtatcctccttggatagaggggactactgtatagtgagagaagtttgcggattttacaatagtatgatgagagttttttctgatggtttcaattttcttattcatatctaagtaaaggccatcagtgttgtggaggtgggtgtgctggtgtaggaggtttgaagaaaaggaaaaaatgtatgaaattgttgattcaaagggtagaaaaacaaacttttctgagaaatggaataagactgatgaacagtatagaggacccacgtgagtagaaacacttccccctctgaggctcaagggcttggtagacatggataaggaatggaattttaaaggatgagagcttttgtagagtagtggtaaaaggaattttcaagatagactgcatgggctcaaatttcagctatgatgtgtgatcttcagaaagtgatataatatctatgagctgaagccttacttatttcatatatacaatggaattaatagtaatatctgtctcatagggattttgaattaatgtattttaagtgctatgcaagtttttgccaatattattcttattctgtgaaatttgagttgaattcagttgttgagagtgagraggtaaggaacaaatgaggcttgaggagtgtattgaaagtttgtacttgtcacccagaggaacaggattggaagctattgaaccaaacagcactgaggacacaattgwgactggaaaatagaaatttgaagaagcagcactacagaaggctgtagagttttctccagctgtgttcagcacatcacagtctaagatcagagaaggcagattgtaaaatacacctagggaggttagtggtacccaactttagtggacatgacaatcacttagagggattgttagattgcccataggctgctgagcccatgcccagagtttctgaatcttcaggtgtggagagattcccaacaatttkcatttctacaaattgctaagtggattctgatgctgctggtggaagaaataaactttgaggaccactgatttacaggaagttattatggggtgggagtggtgaaggggatgcattgtgtagaatagagtaacaggcaagaagacatgagagtgcaggatatttgtaaaagagtagttcaaatgctgaccatggcagtgagggaatttggaccagatagggaaaagaatggagtcaggaggaacctgattwaaaaaggtagaggagagtagggatcttctcaaggacatagcacttatcccaccttgtaattctacatggtttttttgttggtttacttgtatgttgtttcctctcctgactagattctaagaggacaggcactatgttgttttgttgatgactctttccaacactcaacatgtagtatttgttcaatacagctttgttgattgtatgagtgaaaaaaaattgcatgctttcacctctgactcttctttaagctctcctcattccttgagattcagaccaagcctaaactcttctataacactttatccggtgattaatacctctaaactcctgtagttgtttaagtcttacagtataattgacttttttgatgtacagttgtatgaattttagcacatgaatagattagtataatcaccaccgcaatcaggaattagagcagttactttcttgctatccccgccctctttgaaccactgatctggtctcaattcctattgttacatctttcctagaaaaaatatgcatatatatgtatatatattctttgatttacataagtgatatctacatataaatggaatatatttatgtatataaatggaataatacagtatgcaatacttcaggattaacctttttcactcagcgtaattctctggagattcatctaagttgttgtatgtgtcaatagtttactatttgttattgctgagtagtattccatggtatgaatgtaccacattttgtacaacttttcactgttaaagggaatttakattttatccagttattagctcttgttaataaaattactatgactatctgtatagaggcattgattgattgagacagagtctcgctctgtcacttaggctggagtttagtggcacaatcttggctaactgcaacctctgcccccaaggttcaaatgactctcatacatcagcctcccgagtagctgggattacaggtgcccaccaccacattaagctaatttttgtatttttagcagagataggttttgccatgttagccaggctggtctcaaactcctgacctcaagtgatccacccactgtggcctcccagtgtgctgggattacaggtgctgtgtagaagcttttgtgtgaacatcattcacatttctctttggtggatacctagaactaggatttctggatcatatagtaaggggatatttaactttataaggaactgccaaacttttttccagagtgtctgaaccattttacattcccatcagcaaagtgtgagtgattcagttgttccacatccttgccagcatttggtgttatcactgatttttaaaggccattgtgacaggtatgtaatgatatctcattgtaattttgatttgcattttccaaatggctaataatgtttaacatctatcatatgtttatttgtcattcttatatcttgtgttgtgaaatgtccgttcaatttttttttgcctatttttaattgggctgtttttattttgttaaaatttaagagttctttatgtattttggatacaagagtgaagccttgactactatggtcagtccagggctctctgaggaaattatatttaggctgatatttgaatgtagcatagaaatcagccatattaagaaagttacaggacagcttcaactgcaagtgtaaataccttgagacaggaatgatctcaatgtatttaaggaataataagaagacagtgtggctgtagcatactgagaatgatgaagaataataagaaatgagtttgtagatataaagaatgataagtaagatcatgtagagtctcgcaagccatggtagggaatttttgtttagatttactcacagtgaggagctgttgcagagatgtggcatggtttactttgtattttaaaaggttacatttgttgttatgtgaagcatatgttatgagaggaacaagagaggtggctattgtagtttttcaggtgccagaagataatagcgcagactatggtggtagcagtggagatgggtagaagtggataatatgagatagacttttcaggtagatccctcagaattttgatgatggatatgagatgtgaggagtgataataatcaaagataactcttgtgtttttggcttacataactggtggcactatctattgagataaggaagactgaagaggagaaggtttgggggaaaatcaaatatttatttttaatatgttgagtctgagataaaaattagacaaatggaggtgccaagaatgcagttgaataagtcttgaactcgatggagaggttggagagaagttcatgtaaacagaacaacatgacaaaagatacagagctgtgaaagtatgaggtatgcccagaggtgagcatgtagttaggttcgaccagtatatattttgcagaaccagaaagagtaagagatatggctgaaaaggcaggccagggctgagttagagagtgcttagctgatggggaaatttttgaaatttattatttgaatattagggagccattacaggcctttgataaaaggtatgacatgaacaaagagagattttggaaagattaatatggcatagccaaaacaatgttaaaaaagaacaacaaagttggagaactcatacttactggtttctaaacttactacaaagcatagaattcaagattgtgtggcattggcataaggatagacagatagatcaatagaatagaattgaagatccagaaataaaccctctaatttttggtcaattgattttcaacaaaagtgccaagacctttcaatggaaaaaaatagtcttttcaataaattgtgctgaggcaattggatatccacatgcaaaactatgaagttggacctctaactcacaacatacagaaaaatcaactcaaaatgggtcaaagacctaaatataaaagctaaagctataaaacttttagaagaaaacaaaggagcaaaccttcataaccttggattaggcaatggtttcttatatacaacactaaaagcacaagtgaacaaataaattgaaataccttaaaatttgaaatatgctttaaaggacaccataaaaaagtgaaaagacaatccacaggatgtgaaacaatttgacaatcatatatctgataagggacttgtatccagaatccataaggaactattgcttgatgtcattgttatttgacaatgctattatcaaaaaacccataacccaatttaaaatgggcaaaggatttgaataaacattgctcccaagaagatgttaaaatggatattaagcacaagagaagattctcaacatggttaaccgtcagagaaatggaaatcaaaactatagtgagataacacttttcacatgctaggataactaaaataaaagatttttaaaagcagacaataactaattttcatgcagatgtwgagaaattggaaccctaatatgttgctggtgagaatgcaaaatggtgcacgtgctttggaaagcagtttggcaattctttaagtggttaaacatarcattaccatacaactcaggaataaatgaaaacatatatccacataaaaacttgtacacaaatgctgatagcagcactattcataataactaaaaagtggaaatgacccaaatgttcatcaactgaagaatgaatgaataaaatatggtgtatctattcaatggactattatttggcaataaacacaactaagtattgatatgtgctacaaagggggtggacaatgaaaacatattaaataaaaaaattcagtcacaaaataaaatgtatgatataattcaatatctatggaatgcccctaatggacaagtctatagagacagaaagtggaatattgattaccttgggtggggtggggcaggaatggatgggtggattaggggatgagggcagtacaggagtttttttggtggtaatgaaatggaaaatgaatcgtggtggttacaaagttctggtaatatactaaaaacattgaattgaacattttaaaagggtgaattgtatggcatgcaaattacatctcaataaagttgttagaaaagattaatatagcattatttggaagatgaattggagggggcaaggctggaggcagagaaacatgttaggaagctttgtaatggttgagttaagaaaacaagggtccaaactagggcaagagtaatgataattgaaaggagaagaggatggttctaaaatatagggtagaggtataatcaataagacctgccatttggttagatgttgaattacgaaagtgaagaagtaaagattaaagttttgagtctgagtaagtaaaagagtgataatgttatttctagatagacactgagagcacagattgggaaacggtggtttttcaaaggagggaggtgagttcatacaatctgttttcctggtgctgtcaggacaatctttaaaagatattcagcatctaattgaatatttggagttggagcttagtaacaaggggagtctggctggaactaagtatttaagagtcatcgatgcacagatcatagttgaagtcagaaaggtgactaaaggttccaaggagagagtatggaaagagagaagagaactgagacagaactttgtgcaaacaactgcatttaggatatagcagctggaaaaaataaaccaaagcagagcaccccaccccacccccgccccgcaaagaaaaagatgatattaaaagcagagaaaaaaaagtagcaaggctgccttactagaggattggacctgggcctttgaggatagggaaagtagaaaagaaaggttgagggtgtcccaggagggagaagagcaaggtcacaaaaataaaatgatggaggaatgatgaagaaagatcntaaagaagatgggattcactcaccactgcctcttggggagacctgggagttgagagaaatttctgacccggtgcaactggaggttccttgttacacttctaggtgaggtggtcacttatcagtggaacatcccagagwggtctggccctgggcccartgactctgcttgtgtttcctggatctattattctgcagtggatcccatcaaggtaaatacaagattggctacctggaggtgggtcaaactccctggcaaaaagaagctattaaccaggtgtagtaagaagcttactcctgagattctagagcctagaatttggggaacattcttcaaaagctggacttattttaatagacaggargagggacgaagggaatgggtagcaccagatatttgtcatgaagattttcttccttatcttttcattttggatcctataaagcaacatgttctcattataaaaaaaacaaacacacaaacaaacaaaaaacacaaaagaaacctgggattggttgtacagagattgaggttctagtcccaaatttggttatagcatgcttttagagtgaccttaaataagtcattctgcctctgttttctcatctggaaaatggatttatcgatctagccatccatctacagccagccattagtaatcatttattgagtgcctaccacattttaggcattttacttggtgctttggatgatataaatttaagatacatttcccaccttcaaagagtatggtctagttgagcaagagggaacctggagaaggcatcacaatgggaggtgcatgtactctgggccttgaaagctgagtcacattatgccatcagataagggatatgatgatggagagggcattgcaggcagaggaaacagcacaaaaaaacactaggttgtaaaaatgcttggtaggctaagagatcaataaatagtttagcctagataaagcataggtcagatagtgcatcttaactgagtcccaagataattgttagaatgaattcaaataacatagtggggtacttataaatgtaagatatcatgaggaaatgctgagaggcacagtgggcttgtatgagaagctggctccctgcggagtactgctacccagaaacaactccatctctttctctctctcccacttcctcccttcctcaggacatgtatagtggcctggtggggcccttggctatctgccaaaagggcatcctggagccccatggaggacggagtgacatggatcgggaatttgcattgttgttcttgatttttgatgaaaataagtcttggtatttggaggaaaatgtggcaacccatgggtcccaggatccaggcagtattaacctacaggatgaaactttcttggagagcaataaaatgcatggtcagtagtaaaaaacctactcttgttccaaagcagtccctactggttacatggrgatatttaataggcctattgctacctaagggaacataatcccagagaggacacgaacatgggaaggtgaaatggggatgagttagaagaagcatttcctattattgtacatttacatatacaaaggcagatatgtggtccaggttagattgggtgcccagaaagcaggaagttgactctgtaaattgccatggcgataccagaaaattttaacatattagagaaggcaaaatggacatgtatgaccttcaatgtacttgtcaagctggctgcttagtgcccctctattttaaaaccctgagtttagtctgccaatatcatcttatttatttaccactctaaatttgggatctgttttctcaatggattccaatacagccagatgaaagcttgtattttagtctctttttaaaagagtttcaatttatagatggaagaattgaagagatcctcagtgagaagcatactggatttatgtcagatacaaggaagaactttttggtacttgaatggattttggagagaaattgtgcatcaaagccttcctttgtttgagagatctgtgtagcttttcaaaaacaagagaaagaggggagagcataagtgcagtagaatgaagtgatctctcactattccttctagcccaagatttctttgatctgagaatgaggagcatctttgatagtgattctaatggaactaaaaagtcgtatattattatcccacagattttagctatttcaccttgatggagtgatgaatgattcacattagaacagatgattcacagacttcacaaggcagaaattttagcgcctgtcaaatcagagaaatggtccaggataaaaagggaaagaggacacagttaggtcctgttaatgcaggggtttggctaatgcttactttcttctgtttgtttatgtgtctatccacactcttcaggtataagtctacctacctatcgatcgagcaggtatttgttaagcagtttctgagtgctagccctggagatatttgcatctgaggggtaaataaataacatccctctcttccttttcaggttcctgaaccaactgagaaagagagatgcttaagatcaaatgtgaaccttaatactaagaaggctaattgaaaaactgatttcagttctacaactaaatgggcttactaacacttctctggcaacagatagacatttccaccttgtcattgacatagatgggcagcaatactcacctctttggcagagggagaatcataccccacagtgaaataatgaatcggctattgcccatttctgtggcctgattgatgagggagagaaaagatcaataagaggctgagttgatcatgtttagtttcctctctgaaatccacaatttggtagaggtagacatagagacagattataaatgattgcttcctctcttgggtgataaagtggaaattatcttctctctgtaagaacataagaagtgggggaaaattgtccagggaaaagtcctggaagtgtgaattattgtaacaatgagtagtttgatgtccttggagcataggatgtggcctgggaagagacccatgcattaatatcattattaattccatgcattaatatcattattaattctatgcattaatgttattaattccatgaatgtggcaggtatttttttaacatttattgtaggctcagctgtctactgggtgttctgagaaaatacaaggaagctatagtaatgcagtgtatacatacattctttcctgcatattaggaacctatagtctaattggggatgtaagctttcacgcatgaaaagacaggtaaatgtagaagacaatttcttatgagtttcagtgagtcatgcagacagtactggaggagttcacaggtggaaggggatgcagggaatgagagttatggagaggaactaggagatcaggaaagtctttctgggggagtgaagatttgactggactttaaaaaatgggtaaaagaaggcaggatttctagtagggaatcttagaaacacaaggacacaaagaacatgcatggaccatttgagggatggtgaagaaatcaccccaactggaataaatgtgttgggtagtgggagatgaatctaggaaggtggtttggagttatattttgaaggatcttgttgggtgaagtaaggatccatggacttgctctttggagcaggagagagtaattaaaatattttaagcagcagaatgatgtcatcagattcagtcacttagagagataattttgataatatcaatgtaagaagataccttgaagagggacagatggaaaaaagatgagacaaattagaagcccattgctatcttcggtaaaaaagattaggcctaggatagtggaaatgggaagtccaaaggagagatgtaagaagctttttcttttcttttcttttcttttctttttttttgacagcaatcaatgggaaactctatgccaaccttaggggtcttaccatgtaccaaggagaacgagtggcctggtacatgctggccatgggccaagatgtggatctacacaccatccactttcatgcagagagcttcctctatcgggtgagctggaaaatgggctgagtccctcaaggatgattagaacagtggtttaacagcaattgagaaaaaaggtaacagtgtggaacaggtaacaattagttaaagagcagaggtctagtacatggagcactgagctggaaattctagtctggctgtatatcctagactcaataacttcccgctaggccctagctttcccttctgatgtggaagacaaaaaaggcccatttatcagtaaggagactgaaggaatcaatatcaagtctcagtcaaggacttgagactcaatgagcagtgatttttaagaacaaggaatttcagagtggcatctcagaattgctgaaagtccttaatctattataagaagagcttcaacttagggggtacatggaacaatatgtagattttgaaaacagtttagtcttaggtaaaggaggaagagttgggggcattgatacagacttcgagatttagaagtgctgaaaaagacaatggcaaagataactttatttgaatcaatttctaaaggaaatatatgcctcattcataggggtcaaagcttaagccaaattccccatattttagcctgctgaaaattataaagatacttgttttgaaccttctaaagtaacctagaaattctttttctttgggacattttaagaggagaaagtcacctctgttgatttagcttcggtgggtgggttcattggagatatgaataaagtggactttttttttttttttgagatggagtctcactctgtcatccaggctggagtgcagtggtgtgatctcagttcactgcaagctacggcttctgggttcacaccattcttctgcctcagcctcccgagtagctgggactacaagcgcctgctaccatgcccggcaattttttttattttttttattttttattttttttagtagagacggggtttcatcatgttagccaggatggtcttggtaaagtggacttttaaaaccactcactggtctaggaaccttgaagtctcagctccctaatgtggacatcacaattttttggttcctgaaagctctaagatgatttttatacccttcacttcctctccctcattcccaatctctcttgcagaatggcgagaactaccgggcagatgtggtggatctgttcccagggacttttgaggttgtggagatggtggccagcaaccctgggacatggctgatgcactgccatgtgactgaccatgtccatgctggcatggagaccctcttcactgttttttctcgaacaggtaagtcctaacttccccaaaatgatcatcttctaacactttatctagcctataggaagcaggtaataccaaaaagcctcttgattgtctccttctgatcccacaataagcaggtcttaaggcagagcatagcctccctctaggtattgccccaaccagtatttctaatcctccattgcacctgtccctccattgccccaactgatatttctaatcccctgacacctgtccctctccraattacttcaaaacctgttgagctcacatgaattgacccagcctgaaaccggtttggctctatgcattgaagcctagtgcaggcctgcttcttttgaaataaatttaacttatatacaaatgtattacttgacttcattagagtaactgattatttcaaggaatattgctgattagtctttctaaaaagagaataaaaataattctaatagtcacccattaaattgatttgttctatggggttgtgaaaggcaattctttctttttttctttttttttttcttagagtaaaggtcttgatctgtcacccaggctggagtgctgtggtgcaatcatggctcattggagcctcagactcttagactcaagcagtcctcccacatcagcctcccaagtagctgggactgcaggaatgtgccaccacataaggctaatttttatactttttgtagagaagggggtctacctatgttgcacaggctggttctaaactcttggcctccttctgcagcagcaatcctcccgccttggtctcccaaagtgctgggattgcaggcataaggcactgaacctggcctagtttttattttttaggcagggttttgcctaggctggtttcaaatttctgggctcaaaccatccttccacatcagcctcccaaatcgctgggattacaggaatgggccaccacatctagcaagacagttctttttggtttttgaatatcttcatctaaggctagaaagagagattgtccttcagttacagcttatctgagttactaccaagggtggaaacaactttttctttatattttatatggagagggagcarctgggacaatttctttaccagccactctttgttcctcaccaaaaaatgtagatgggtaggctgtgttggcttttgtgtctttgagtaattaaagggtcaaatgtcttacttcttaaggttcttgacctgagtccaatccccaacactatttgccttccaagaagccctgtagagccttttgggacccatacaaatcaaggctgtgtttttttttttttttctatgcttttaaagaatatatagccaccatttgaacaaaaatggttttctggggttgtcagtcattggcattctatcaacaagaatagtgaaggggaaaatgtctttgaatattcrtacagacttagcaaatgtgggtggagaatacaactcttctgtttacccttagagagagagatgaatgattgcacattatgacttcctatataatttaaaatatttattctctatcaactaatactgctagaatgcagcttccacttaactactcaggagctattccctagcacccagatttacagaaacttctttgttgtgttgtaagtacatagaacaaaagtcaagtgatcaattgatacatcatcaggttgatatagatccaagacaacaggttttctctatatgtagtaatgggttatcccaaatatgaaccatccaatatatgagaccatttcaatacatattgccagggtacttccatgaggaaggatagctcatatctctctatgacaatgagccagcccataaatcttttctatttgcccttttgtttttttataacccgctatggcctaatttcatattgtttcaactccatgtgtgttaacaggccaacaggaaggaagagttgaaaagacagagggaaaagactaatttttggaacaaggtttctgataaggcagcagggaatgagaatcagagctaacatgaaagaktagtgcaagagtggaggaaagtcatctttctactctaagaagaaagaagacagaaaatataargatcaatgtgtaggtttgaccagggggtttgacagactgacagataatttcagcctatggtctttctcttctctctgatggagcaaatagagtcatctgctgagaatgaaaggcaggttatagggtacagggcttgagaaaagtggatgaaagtttgaaatagccactctgggggatgggaaataaataattatcaccagccagcattgagggcttagttgaaattggacacaaaggataataatctttacaattgtgttattttctctaacagcaattaagcataccagacaaaatacagggtaattacagttactggagttttggtagattattgcaacactcttggtagattagtagttgaagtgatagaccttggagtctcacttggtcaggaatggaagaaaagacaggatgaagctactaggttgaggaaaaaaactgaaggttttgaaagctagaggtctcatggcaggggaggataacaggtttttgaaataaagtgtattagagcactgaaaggatgggaggttgttgttagattttagatttctgagatgtaacaattcttgataacaaggttaatgtgaccatgggagtggttggtagaattggagtagacatcaaagttattggagttaaaagggctagaaactgtgaggcttgagtatttgatgrgtcagcacccatggttggaattgagggagaggaagactgagccaggtactaaagacttccataaatgaagagaactgctagctaacaataacaakaaatgattgtagttctagccaaataatatgagcctcaaaagagatatgtttttacaaaaagaggaggaacaatgatctcaaagaagtattgagatgatgtaaatgaagtatggtcctcagagaagaactcagctttattaaatcaaggagaggaagaagtgttctgagaagatgttgaatgtgtagagaagtaggtttcacaaggagcagggatttcctgaaggaagtgtggcaaatggttggaaatagagcaataatggggatagaggaagtgccaagaaatatttaaataatagcagaggggtgatttacattttggactccaagcctgttctcttgcccatatttcatgtcactgttcaaaatcaaatcaacataccaatattgacttggactataaagtagtaaattctgcctttattttgcttacttaatcacagagaaatttctgcaaccaatgttgacctttcatagggggcctatggattggtaggaagaacaataaggctaacctcttgtcttttttccccccaaccagaacacttaagccctctcaccgtcatcaccaaagagactgaaaaaggtacgtaaaatgatgcacagactgggtacttatacatagtgtgtctgtgtatgaggttgggtgaagtacctttagggtatgggacttatgtgactgagagttagaatacatcagcagaaagtatcctgagacttctgcaagacttcagaagccaaagaaccaaggtttagcttccctcagcaggtttattctctctggcttccacctcaaacctcctgagttggggaaaacagcctcctccccatttaaaggctgctgtcttagcctctcatctaatgtgtgaggggggaagtaaattctagatactagtcgaaaaccaaatactgcatgttctcacttataagtgggagttaagctatgaatatgcaaaggtatacagaatggcataatggacattggagactcagaagcaaggagagtagaagggcagtgaggaataaaaaactacctattaagtacaacgtacactacttgggtgatgggtgccctaaaatcccagactttacctctacacaattcatccatgtaaccaaaaaccacttgtactcctgaagctgttgaaatatatatatatatatgtaaaatatatatattaaatatatatatatattaaatctaggtcctgctgggttggacatggaaaagttatagcacaaatatgaatcccccctagggacagtatgagactagttccaacaccatatgttcttcaacagctatttttattcttgcctctttccctttcatctatggaataccaaggagttaaacctttggaaccagccatttctgaccttgaatactgtagagattatttttctgtgcagcccaggtccaaatagtgttgttattctccacctcatttgtctctggactaggaaagatccagaaaggtatgagagctaaaaggaacattagagataattagtagtttagtctgaggttttacagctgtttggagaagtcttaatgatctgcctaagtatctcatgaactgttaaccaggggaccaggatatgtcctggaggggatggggaaaggtaaggtgtgattgtgtgggtgggctttcaggccatgtctctttcaacctgagcaactaaattattttatatatatattatatatatatatttttatatatattttaaatatttaaatattttatatattttaaatattatatatatatttgtgttcacacatactttgtgtgtatatttgtatayatacatacatattttgtgtacatatatacattcctcataagctctcatttgttaaaaagtttcyacaatggggaaaaaagcctttgaaactgttgttctaataaaactcaataattttctacatgagaagctgagaaattgaaaatgatttgttcaatgtcacaaaaggagtatgtggtagaatgtaaactcagaaccagaaagttttgagcttctatttgaactcattatattctgtcttctctcagttgtgttagaacattaattcaaccagttatgttgaattacattgattgatgttgatgaacaatcatcaaacaagtgtcaggtaccagggatatcaaaataagtaagacatagcygctatttttcagcgtctataaatggaatgaggcacagaaataataatgctggatgctgtgtgctgtacaaaaagggcaagcaataataacagttaacatgtattgggtacttcctgtctgctaggtgctatactagatattttataagtattaattcacttaaattttacaatatgcctctgtgttaggtatggttgttattctgattttataaaagaagaaactgaggtttagatgggaagtgagggattaggtctcttggcccaaggtcacacaataagttaattatgggggtacaaggtacaggcgcttsgaaaacatagaggaaagaacaattgtctaatgaaatcaaagaaaactttgcagagacatgtaaaatttaaggtagggctagaaagataaggagtaaagtgtgttcagacaaagggattagcatgagcaaagtcttagaagcctgaaaggggatcactttttatgaggaggaaagaatgtgttgctatggctgaaaactagtagataggactagaaggatagattagagcctgatactgagagttggaatgtctggtttaaaagtctgagcttttctctgtaggctaattgggaatcatcaaaagtgtgtatgccaagaactaacaatcagatatttctcttggaaaggtctatgtgacatcagcgttaacatgacccaaagaggtaagactggacagcctagtagcaggttcttgtcatggtttaattgtcaaaattgctattgataagctggatgactgagtcaaatttctttctgaagtttcccttattgcctccaattctaccctctgaagccatacagaacaagtcaaattcatcttttttttttatatcacagtcctttagatatttgagaacatgtatcaagggccttcccaatctgagtcttagctctttccatgaatggactggggcctcagtgattctcaaggacccttatagctgttacatcatgttttcttgattctctaacctctaaatctgtcttcatcagctagttttgtgaaggataaggacaggyctcctgtcctatttggattgacttgtttttttcaggtgatgactatagatagttaccttttagagtactccccatcccaggatgcccattttttttttctccatttcagcaktgccccccagagacattgaagaaggcaatgtgaagatgctgggcatgcagatccccataaagaatgttgagatgctggcctctgttttggttgccattagtgtcacccttctgctcgttgttctggctcttggtggagtggtttggtaccaacatcgacagagaaagctacgacgcaataggaggtccatcctggatgacagcttcaagcttctgtctttcaaacagtaacatctggagcctggagatatcctcaggaagcacatctgtagtgcactcccagcaggccatggactagtcactaaccccacactcaaaggggcatgggtggtggagaagcagaaggagcaatcaagcttatctggatatttctttctttatttattttacatggaaataatatgatttcactttttctttagtttctttgctctacgtgggcacctggcactaagggagtaccttattatcctacatcgcaaatttcaacagctacattatatttccttctgacacttggaaggtattgaaatttctagaaatgtatccttctcacaaagtagagaccaagagaaaaactcattgattgggtttctacttctttcaaggactcaggaaatttcactttgaactgaggccaagtgagctgttaagataacccacacttaaactaaaggctaagaatataggcttgatgggaaattgaaggtaggctgagtattgggaatccaaattgaattttgattctccttggcagtgaactactttgaagaagtggtcaatgggttgttgctgccatgagcatgtacaacctctggagctagaagctcctcaggaaagccagttytccaagttyttaacctgtggcactgaaaggaatgttgagttacctcttcatgttttagacagcaaaccctatccattaaagtacttgttagaacactgaaagactgaatttggtgatttttgacagtctctgtggcttctgtcactgtgattgaaacagaaaatacttagggggtgagtgagtatagtatgtatttgtctagcctttgtagaacctacaagtttttgttttagagatgaggaagctgttccagaggaagcatcaaagagtgctgggtaccaccctagaaaaggagctgtcgcataaatgacaaaaattttctgagtgtcaagaaaatttgccagagggaaatagaagtctgagacgagactcaaacctgtccagtgggccaggggaagtaggaccatatcttatggggcctttttggcagtggtggtgtgaaaggtctagttgcaactttgggggcttccttataggatggagtcattctttctggtattttacagcaatattcctttgttacatgcaaatttgagccaaatattggttagagagcacagataagtgataaattttagattgggtaagatggcccaccccactgcaatatccataatattgtaccacatggcaagtggagaacagaagaggtatcaaggagagaaaagatgataactatgtactgttttacactttaaaaagcattttaattcttgattgcgtttggattacctcagggcaagtcattttacatttgagtaatgttatccatttatacatttgagtgaacaaaagcttatggacattaagtaacttcatccaagatccctcaggtagaagttgagcagggattcatgtattcatctgtttgactccaaatacctatttcatcctcatatatcatggaaacatccactaatctccatccaccttacccatattgattccaacttttctgtctgtccagcaatctgtctgtctaggtagcaatctcttgaagataaaatgtagaaactcacagagctggtgttcagttacgatataagtttggaggagaaaacacaatccagaagctatgattcctcttgtttttccatggtcaatgggtttctggagagctttactgagaatctcagaaataaagtgtgggtggaagggggatttagatggctagttatccaagagttagtgtttaggccattgcagaatcaatgatttaacagcagcagaactgttttggcctgcagttaacatgaatgttaatgaagaccaagtacatgctaggaattccagtcaattaatggttataatttacatgcaactaggaggttcttagcttggtctcagttataactctaagagactaggagaggtagatgagatggaatgcatttcttcttattttgtaatcctgctccaggtcaaggaatagaaactcagagcccatgtatttaagaaagaaatgtatttttgtggtaagtttgctccaagtagggatacaagtatctatttttgacaatcaagtgacattgccatctattcagttgctcaagctggaaattatcagtgtcaacacatcagtgagtctcggttttatctccaaaatgtatttatcctattcatttgtttctatctccattgctattcgtttccatctccattgctaccacctaagtttaaaacacaaccatctgacccaaagcaatctatagattcagtacaatccctatcaaaatactaatgacattcctcacagaaattaaaaaaaaaatcctaaaattcatacagaaccacaaaagacacagaatacccacagctatcctgaggaaaaagaaaactgggggaattacattacctgatttcaaattatactgcagagttatagtaacaaaaacagcacagtactggaataaaagtagtcacatagaccattggaaaagaatagagaactcagaaataaatccacacacctacggtgaactcactttcataaaggtgccaataacacacactgggaaaaagaaagtctcttcaataaatggtgctggggaaactggatatccctatgtggaagaatgaaactagttccactgtcactggccatatacaaaaatcaaatgaaaatggattaaatacttaaatttaagacaagaaaaaattagggaacacctccaggacattggtctgggcagaaatacctcaaggaataccccacaagcgcaggcaaccaaagccaaaatggacaaatgagatcacatcaagttaaaaagccactgcaaagcaaaggaaataatcaacaaagtgaagagacaccaaacagaacgggagaaaatatttgcaaactacccatctgacaagggattaataactagaatatataaggagctcaaacaaatctacaggaaaaaatctagtaatctaatcaaaaattggcaaaatatttgaatagacatgcctcaaaagaagacatacaaatggcaaacagtcatatgaaaaggtgctcaacatcatcaatcatcagagaaatgcaaatcaaaactacaatgagatatcatctcaccccagttaaaatgtcttatatccaaagataagcaataacatgctggcaaggatgtggagaaaagggaaccctcacaaactgttggtaggaatgtaaattagtacaaccattatagagaacagtttggaagttacaaaaataaaaatcagggagtggccaagatggctgactagaagcagctagtgtgtatggctctatctctcatggagaggaagggaaggggtgagtacatatggtactttaaactgaaatatccaggtactcacattgggactaatcaagtaaaccacttgacccatggagaatgaagaaaagcaagacagaacagtggctcacctgcgggcaacacagagccaggcgaaccacggtaccatggttctcccaagtatctttacagcccttaggtcaggagatcacctggtgaagccactccactgtggccttcagtctgaacatgcagggctacgtggagtcttggcagggcatctgctcaggtatgattggagaccctggagccttagctatttgggttttttggcaaaaatagctgtaacttgggcaaagtgggaggttagacccccatacatacccataggaaagaggctaaatttacagggctgagcagcaacagcctgcagtcccaacttccatggcacatggcacgtcacaagataagatccactggcttggaatttcaaccagcctccagtaactgcatttcacaccctaagaaggaggtcctgggaggaggggtggactgccatctttgctgtttgggtgccttagtcattccagccttcaggctttgtaaagtccaagctgatgggtggcagaagggatccctcaacacagcccagctgctctaccaaaacgtggccagactgctactttaatcaggtgcctgatctcatttctcctcactgggtgggaacttccaactggggcctccaaccattgctgttggcattctacagcaaacagagatttgtaatctccctgggatggagctctgagagggaggggtggaccactatcctttctgtctgggcgacatatcctttccagccttcaggcttcatagtgtctgaggcaactggtgcgctgaagcagattcccagcacagcacagctgctctaccaatatgtggccagactgctttttaaagtggatcacggatcctgttccaactcactgggtgggaacccccaactgggatcttcagccacctcctacaggtgtgtttggaccagcaactggcccatatctccctgacgyagagctcccagagggaggaacagactgccatctttgctgttttacagccttcactggtgataccaggtactggaaaatctgaggtaactcagggctggagcagtttccaagcatactgcagcagccctgtggaaaagtggccagagtgttacataactgcctgttcccatttctcctcaccagataggtcctccagacctgggattccagccacttcctgacagagctattgagccagtaacaactcagcaactctctggatagagcctccaggagcaactgaaagcctttctgccactgcctctgcagtggaattgcttttgtcacttacagactaatgaaggaacaaagactctaagtgccctatccacacctccaacaagctgcagtggacccaaggagaggaggcaagtctgtcccccatgagttccccacacacagctactgctcatgaccagagaacccctagcttgggcccacagcacaggagtcccatactgggctgattgcactgagctattgctgacctgcatctttctgagaagtatgggattatgtaaaaaagccaaatctacaaattattggcatccttaaaagggaaggggagatagcaaacaacttggaaaacatatttcagaataccatccatgaaaactttaccaaccttgctagagatgccaacagtcaaattctgaaaatacggagaactgcaagattctacacaagattatttccaggacacttaattgtcagaaattctaaggttgaaatgaaagaaagaatgttaaagtcaggagaaatgggcaggtcacctacaaagggaaccctatcaggctaacagaggacctgctagctgaaaccctacaagccggaagtcatttggggcctacattcaacattcttaaagaaaaaatatcttcagccaagaatttcacatccagccaaactaagcttcctaagtgaaggagaaacaatgtccttttcagacaagcaaatcttgagggaatttattacctctagacctgtcttacaagagatcttgaaaggagcactaaatatagaaaggaaagactgatacaagctaatacaaaaacacactcaaacacacagagcagtgttaatgtatagcaactgcacaaacaaggcaacataataaccagctaacaacacaatggcgggatcaaatccacacatatcaatgctaatctttcatgtaaatggtcaaaatgcctcacttaaaaggcacagagtggcaagctggataaagaagcaagactcaatggtatgctgtcttcaagagatccatctaacacgtgaggacactcataggctcaaaataaagggatggaggaaaatataccaagcaagtggaaaaaaaaaaaaaagagcatgtgttgcaatccttaattcagacaaaggagatttcaaaccaacaagaataaaaaaaaaaggcaaagaagggcattacataatggtaaagggtccaattcaataacaagaagtaactatcctaaatatatacgcactcaacacataagcatccagattcataaagaaagttcttagagaccttcaaagagacatagatccccacacaataatactgggaggtttcaacactccactgacagtgttagatcatgaggcaaaaaataaagatattcaggatctaaagtcaacattggaccaaatggatctgatagacctttacagaaccctccatcccaagcaacagaatatacattcttctcatcaccacatggcacatactctaaaatcaaccacaaaattagacataaagcaattatcagcaaatataaaaaaaatcaaattcataccaaacacagtctcaaaccacaacacaataacaatagaagtcaacactatgaaagtttctcaaaaccatgaaattaaatggaaattaaacaacaggctcctgaatgattttggggtacataatgaaataaaggcagaaatcaagaagatcttttaaaataatgagataaaacataccacaatcactgagacacagctaaggcagtgttaagagggaaattcagagcattaaatatccacaccaaaagttagatctcaagaatgtaacttcaaaactgcacaagcaagaacaaatcaaccccaaagctagcagaagatgagaaacaataacaaaaaattagagctgaactgaacaaaatcaagacacgaaaagccatccaaaagatcaatgaatccaggagttgttttttgaaaaaattaataaaa

SEQ ID NO: 94206 - DNA, 24840 bp, Homo sapiens
  misc_feature (1)...(24840): n = A,T,C or G
agaatcgcctgaacccaggaggaagaggttgaggggagccgagatcgtgccattgcactccagcctgaacaacaagaacaagactccatctcaaaaaaaaaaaaaaaaaagaaaaaagaataaatagaaaagtttatcagagaagtaaagaaactgaaggatgtctactccataggcagagcaggggcctggggcataggctgttctactgagcatacttacggttctttctttattatatgctaaacaaggggtggattattcatgagttttccaggaaaggggtgggtagttcccagaactgagggttcctcctcttttagattatatagagtaactttctgacattgccatggcatttgtaaactctcatggccctagtgggagtgtctcttagcatgctaatgcattatcattagctcataatgagcagtgaggacgaccagaggtcactttttttttttcttttttttccgagacggagtcttgctctgttgcccaggctggaatgcagtggcgtgatctgggctcactgcaagctccgcctcccgggttcacgccattctcctgcctcagcctccccagtagctgggactacgggtgcctgccacctcgcctggctaattttttgtatttttagtagagacagggtttcactgtattagccaggatggtctcgatctcctgacctggtgatccgcctgccttggcctcccaaagagctgggattacaggcgtgagccaccacgcccagccgaccagaggtcactttcatcaccatcttggttttggtagggttagacttctttatcatgacttgttttatcagcaaggtctttgtgacctgtatcttgtgctgacttcctatctcatccaatgactaagaatgcctgacctcctgggaatgcagcccagcatgtctcagactcattttaccccacctctattcaagatggatttgctctggttcaaacatctctgacaccttgggctccaaagcactgggaatgcaggtgtgagctgccacattctgtgtgtatgtgggccttctttcactcaccacatcccttgggggnnnnnnnnnnnnnnnnnnnnnnnnnnnnnnnnnnnnnnnnnnnnnnnnnnnnnnnnnnnnnnnnnnnnnnnnnnnnnnnnnnnnnnnnnnnnnnnnnnnnnnnnnnnnnnnnnnnnnnnnnnnnnnnnnnnnnnnnnnnnnnnnnnnnnnnnnnnnnnnnnnnnnnnnnnnnnnnnnnnnnnnnnnnnnnnnnnnnnnnnnnnnnnnnnnnnnnnnnnnnnnnnnnnnnnnnnnnnnnnnnnnnnnnnnnnnnnnnnnnnnnnnnnnnnnnnnnnnnnnnnnnnnnnnnnnnnnnnnnnnnnnnnnnnnnnnnnnnnnnnnnnnnnnnnnnnnnnnnnnnnnnnnnnnnnnnnnnnnnnnnnnnnnnnnnnnnnnnnnnnnnnnnnnnnnnnnnnnnnnnnnnnnnnnnnnnnnnnnnnnnnnnnnnnnnnnnnnnnnnnnnnnnnnnnnnnnnnnnnnnnnnnnnnnnnnnnnnnnnnnnnnnnnnnnnnnnnnnnnnnnnnnnnnnnnnnnnnnnnnnnnnnnnnnnnnnnnnnnnnnnnnnnnnnnnnnnnnnnnnnnnnnnnnnnnnnnnnnnnnnnnnnnnnnnnnnnnnnnnnnnnnnnnnnnnnnnnnnnnnnnnnnnnnnnnnnnnnnnnnnnnnnnnnnnnnnnnnnnnnnnnnnnnnnnnnnnnnnnnnnnnnnnnnnnnnnnnatgcctggctaatttttttttggtttctttttttttctttgagatggagtctcgctctgtcgcccaggctggagtgcagtggcgcgatctcggctcactgcaagctctgcctctcaggttcatgccattctcctgcctcagcctcccgagtagctgggactacaggcacctgccaccatgcccggctaattttttgtatatttagtagagacagggtttcactgtgttagccaggatagtctcgatctcctgacctcgtgatctgcctgccccggcctcccaaagagctgcgattacaggcgtgagccactgcacccagcctaatttttgtatttttagtaaagacggggtttcaccatgttggccaggctggtctcgaactcctgaccacaggtgatcacctgtctcgacctcccaaagtgctgggattacaggcgcgagccaccgtacccagcctttgttccactttcattcccaccagcagcgcatgggtgttcctggagctccatgtcctcactggcacttggtgttgccagtcttttgttctcactatgatccacgtggacagatctcatggtggttttcatttgcatttccctaataaatactgtataccaccaagcttgtccagcccttggcctgcaggccgcatgtggcccaacacgaattcgcaacctttcttagaacatgagattttttatttgcaattttttttaagctcatcagttattgttagtatattttacatgtggcccaagacagttcttccagtgtggcaagggaagacaaaagatggctacctgctctataccttcttctgtgatgtatatttcctatttttgcatttcaatggagagaagaaagtcctctcaacagatgctggaacaggtggagaaaaactactttccatatccaggtcacggagacaaaaataaagggggccaggcgcggtagagaaaaactaccttccacttctaggtcacagagacaaaaatcaagggggccctgtgcggtggctcatgtgaaaccccgtctctactaaaaatacaaaaaattagccgggcgtggtagtgggcgcctgtagtcccagctactcgggaggctgaggcaagacaatgtcatgaacctgggaggcggagcttgcagtgagccgagatcgtgccactgcactccagcctgggcgacagagggagactccgtctcaaaaaaaaaaaaacaaacaaaaaaaaaacaaacaaactggagtggcctcaaagactcttaacataacagctgaaaaccaagacatcataagaaaatatttttgaggccgggcgcggtggctcacgcctgtaatcccagcactttgggaggccgaggcgggcggatcacgaggtcaggagatcgagaccatcctggctaacacgatgaaaccccgtctctactaaaaatacaaaaaatttaaccgggcgaggtggcgggtgcctgtaatcccagctactcgggaggctgaggcaggagaatggcgtgaaccccagggggcggagcctgcagtgagccgagattgcgccactgcactccagcctgggcgacagcgagactccgtctcaaaaaaaaaaaaaaaaaaaaaaatatttttgttggctgggcgtggtgactcacgcctataatcccagcactttgggagactagggtgggcggatcacgaggtcaggagattgagaccatcctggctaacacggtgaaactctgtctctactaaaaatacaaaagttagctgggcgttggccgggcgcagttgcttaacacctgtaatcccagcactttgggaggccgaggcaggtggaacacgaggtcaggagtttgagatcagcctgggcaacacggtgaaaccccgtctctactaaaaatacaaaagtagccgggcatggtggcccatgcctgtaatcccagctactcgggaggctgaggcaggagaatcgcttgaacctgggaggcggaggatgcggtgagctgagatcgcgccattgcactccagcctgggcaacaagagtaaatctccatctcaccagaaaaaaaaaaaatttgtcactttggagcaagcaaagactccttagagaagataccaaaaaagaggagtaaatataaaattaaaacttgataaattgaacttaatcaaaataaaaagctaacgttcattaaagacactattaaaatgaaaagggaacacatgctgagaggaagtattgaaaccacctttgcaaaattataactaaggaaattatgacagtgaaagataacagacttaaccaattccatcttgtttctaaccttcaaacggtccttgtccattactggccataggccaaacaagtcttgggaaggaatttaatttatagtttaaataatagcccttccccaaaactagactgttcttgtaaaatgaatgaaaggccaccagccaccaagttagaatgagaggggctggaagtctaaatattatcagccattattctggaggtcataagataagatttgcaacttccccaagatatcaacactactgtgaacctagggttggccttttttttttttttaaatggagtctcgttctgtagcccaggttagtgtacagagggacaatctcggctcattgcaacctccacctcccaggttcaagccattctcctgcctcagcctcccaagtagctgggattacagccatgtgccaccacgcctggctaattttgtatttttagtagagacggggttttgcatgttggccacgctggtctccaactcctgacctcaagtgatcgcctgctttggcctttcaatgtgctgggattaccaggcctgagccaccgcgtcagcctaggatttgnnnnnnnnnnnnnnnnnnnnnnnnnnnnnnnnnnnnnnnnnnnnnnnnnnnnnnnnnnnnnnnnnnnnnnnnnnnnnnnnnnnnnnnnnnnnnnnnnnnnnnnnnnnnnnnnnnnnnnnnnnnnnnnnnnnnnnnnnnnnnnnnnnnnnnnnnnnnnnnnnnnnnnnnnnnnnnnnnnnnnnnnnnnnnnnnnnnnnnnnnnnnnnnnnnnnnnnnnnnnnnnnnnnnnnnnnnnnnnnnnnnnnnnnnnnnnnnnnnnnnnnnnnnnnnnnnnnnnnnnnnnnnnnnnnnnnnnnnnnnnnnnnnnnnnnnnnnnnnnnnnnnnnnnnnnnnnnnnnnnnnnnnnnnnnnnnnnnnnnnnnnnnnnnnnnnnnnnnnnnnnnnnnnnnnnnnnnnnnnnnnnnnnnnnnnnnnnnnnnnnnnnnnnnnnnnnnnnnnnnnnnnnnnnnnnnnnnnnnnnnnnnnnnnnnnnnnnnnnnnnnnnnnnnnnnnnnnnnnnnnnnnnnnnnnnnnnnnnnnnnnnnnnnnnnnnnnnnnnnnnnnnnnnnnnnnnnnnnnnnnnnnnnnnnnnnnnnnnnnnnnnnnnnnnnnnnnnnnnnnnnnnnnnnnnnnnnnnnnnnnnnnnnnnnnnnnnnnnnnnnnnnnnnnnnnnnnnnnnnnnnnnnnnnnnnnnnnnnnnnnnnnnnnnnnnnnnnnnnnnnnnnnnnnnnnnnnnnnnnnnnnnnnnnnnnnnnnnnnnnnnnnnnnnnnnnnnnnnnnnnnnnnnnnnnnnnnnnnnnnnnnntgcaagtcagcgatggtaagaagcagggcagctgggcctcctacgcctgcctcgccgttcggtcccccgggacacctctgggcttaggactcaggggaacagattcccagaagcaggttccccgccgcgtccggcgcccgggctctgcagccgccccccgctctgcctcctgcacccgcagggcgtcccccgccgctccctcccctgcttcctgcagcggcccccgaccccagtcctggccccaccatggatcctgcatcgccgggttcggccctggcgggttcagccccgcagagtcggcacccgggccaggtccatctcctccagccctcccggtgcgtcccgcggggcaggaaggaggcgaggcccagccgccccgtgtcgtgcaggtgttttcccgggcccgtccgcggcggctgctgaggacctggggagacccagcctgtaggatccgcagctgcggtgcgcggccggcagtggcgctcgggcttcgtccccgggggcggggcttcgtccaggcgcgcagggaccagcgggcctcgccctcccgcgccgctttccgattggcagccgcccgcggggcattgtgggccgtccgcgcgcccgtcccgtcgccgccgccgccgccgcagacccctcggtcttgctatgtcgagctcacccgtgaagcgtcagaggatggagtccgcgctggaccagctcaagcagttcaccaccgtggtggccgacacgggcgacttccacggtgaggacggcgcggagcccgggcgcggcgcaagcgccctccagaggccccggcgccccgatttccccgggtctcccgttccgggacgcggaccgggtggcggtgccccgggcggctcgttccgggaggaatgagcgcaggtgccggatgttggggccagggacagccgtgaggggagcggggcccgggtcggccgtgagaggcgcagggccagcggcgaccgtgaggggaacggggcccgggtcggccgtgagggagcagggccgggggcagccgtgaggagctggggtcagccgtgaggggctcggtgctggggtcagcggtgcgggcggtactgacgggtccttgcgagccgtggggcacgaagccggagccccagcctcgccctccgcccagggtggggtcggctgcgccctcagaccccgcacccgggacgggctgtgggcagcccgcgggagcccctctgtgcaccttcatgggtcgaggcagctttcagagcctttgagttcaggagagattcagggtagagcttcgagctgacttccacgtggccagtttgtggtcagcgagatgcaattttgttgggctgatgtctgcagagcggggacatcagctagctctgaccagaagctgccagtgctgccatcgcccttgagccctgcggtgcccagtgggacaactccgtgggcggcaggtgcccggcctgctggacagccaccgccagacgcaccgggtgggtaaaagccggtgcccatgaaagcacagggttggtacactgttaaatactggattttcctgggcttgagttgtttacattggagagaacttggaaaatacaaagaaggattattttattaatacttagctcttctgtcctctgcagtgcagagtagacgagccttgtgtctatgttttgttgagaacaagtaatattttttaagaaaatcatgaaacgcttcatggatgaatgctgcgagcacctaatacggaagtgacttcctctcttttctgctttctcatggtgacttgagaaacaggctttaatycctctttggtaactgagtaagggcattgtttatctagcagagcctagagagtgaattggcatgtttggctgcttaaccataaaatatggggattcagtgactggcttggggtgccacagtctgctccggacccctctttgggagatccaaagctagagctgtgaatccctcacacacacagcccccccgttgtagtccagacctctcttcataagaaagaaagctccagaaaaggggctacacatttttctgctgctcagttttttcccttcttagcactgagaataatttgcagtttgcctggtggacagagcgctcatctgtattgttccttgctggccctcaccagttagggcagagctggtgcggagtgtcaggtccattacacttggcagtgcagggccaataaagatggattttcctaaacccacacccacaggagggctggggagtcctgggtttctggttttgttttgtattgttttttaagaaaacttctggcccagcgaggtggctcacgcctgtaatcccagcactttgggaggttgaggcaggtggatcacgaggtcaggagttcgagaccagcctgaccaacatggtgaaaccccgtctctactaaaaatacaaaaattagctgggtgcggtgttgcatgcttgtaatcccagctacttgggaggctgaggcaggagaattgctgaacccagaaggcggaggttgcagtgagccaagatcacaccactgcactccagcctgggcgacagagcaaaactccgtctcaaaaaaaaaaaaaaaaaaaaatcttctaaacccaagttgtgacattttttttwaatgaatattaacaaaaaaatacattcattgatagtatatgttcataaatgttatatagttgtaaaatagtctgttgggtttgtgatctgtagtttgtgaagtgaaggttcttaactccttgtgggagggaggcacaggcctctggaaatagaatcaaagctgtgaatgctcttcccacaatgtgatcctccccattttgcattcagtttaaggatccctggaccctgaaacccatttttgccccaatgggccttggttttgttttaattttgtaaaagccatttgctaaaagctgactttatccaggggtgattttacaggaygaaatgggctgttttcagtgcctcattcagtgcattctggcagacctgtgttagcactgtgccagatgtcatgttgaaatgagtatagatgcacaacaggctttttcttaacttgtcatgttgaaatgggtatagatgcacagaagttgcaaaatcagcccatacagtcctgtgaacccttcaaccactgtcccccatggtgacatctcatgtgaccatggcatggcatccacaccgggaagtgggcactgctgtggtgctgatgctgttatagactgcaggcctggctcagggctccccagtttccccctgcactggggcaaggaggctatgtgacagtttcataaagtgtgtaaattcctggaccactgtgacaggacatagctgtcccattgtcactgagatccccgtgtccctcagagacccctcattccctgttccttggcaacctctaacctgttctctacctctatagttttgtcattaaaggaccctttgaaagtacttattccagcctgcgcaacatggtaaaaccccatctctacaaaaaggaagaaaaaaaaatagccaggcgtattggtgcacaccgtagtcctagctactcaggaggctgagttgggaggatcacttaagcccaggaggttgaggcagcagtgagctgtgactgcgccactgcactccagcttaggagacaaagtgagaccctgtctcaaaaaaaaaaaaagatatttatttgccaaataaagttactgaacttgtgaacttcggccgggtgtggtggctcaagcctgtaatccgagcactttgggaggccgaggcaggycgatcatgaggtcaggagatccagaccatcctggctaacacggtgaaaccccatctctactaaaaatacaaaaaaattatctgggcgtggtggcgggcgcctgtagtcccagctactcgggaggctgaggcaggagaatggtgcgaacctgggaggcggagcttgcaatgagccgagatcgcgccactgcactccagcctgggcgacagagcgagactctgtctcaaaagaaaaaaaaaaagttactgaactggctaatctggagcaatgggccattctatgggtgtcaatggccataactcttcacctccactttccatttggacagccagatgaacaagaccccaggttaagcctcgttggcttctttgaattcctagcttggttatgtgagaaataactaatgtgttaaaagaaacaatagttttaagaataaagaatcccttgggtttttgtttttggggttttttttgagacagggtcttgctctgtcacccaggctgtatagtggtgcaatcacgtggtgcaacacggctaactgcagccttgacctcctgggctgaggtgatccccccacctcagcctcccaagtagctgggactacagatgtgcgccaccactcccagctaacaatccttgctgaagataaccatgtggtatctgtgttgaagtcaaaataaaatgtagagacgaatctctaaattcaacgttttatttgggaagaaaaaattgcagttcaagcagactgggtggtcttcgatctgtccaaagaacaagagaaagttggggccagcctcggtggctcatgcgtataatccccagcactttgggaggctgaggcagaaggattgtttgggcctagcagttcgggaccagcctgggcaacacagtgagaccacatctctacaaaaaatttttggctggtggcttacgcctgtaatcacagcactttgggaggccgaggagggtggatcacctgaggtcaagagatcgagaccagcctggccaacatggtgaaaccccatctctactaaaaatacaaaaaattagccgggtatggtggcaggtgcctgtaatcccagctactcgagaggctgaggcgagataattgcttgaacctggaagayggaggttgcagtgagccgggatcacgccactgcactctagcctgggcgacagagcgagactccatctcaaaataacaataataataataataaaccatcaacctcattttgatggtaattgatgtgtgtgcatgcatgcatgtgtgtgtacacagttcctgtctcataactcccacagccctgttataatgttggggcactctaggcctcaggagcaggccttggaaaacagaatttccatcactgaccttctcctctcctttcacctgttcctttctctcttcaagggaggaatctttcctgcctgttttggagctgtccataaataaattmtctacttgcttttcttttctttttttttggaggcggagtctcgctctgtcgcccaggctggagtcagtggcgtgatctcagctcactgcaagctccaccttccgggttcacgccattcttctgcctcagcctccagagtagctgggactacaggcgcccgccaccacgcccacctaattttttgtattttttttttttttttagtagagatggggtttcaccgtgttagccaggatggtctggatctcctgacctcgtgatctgcccgcctcggcctcctaaagtgctgggattacaggcaccagccaccgcgcccggccgtctacttgcttttctaattgtgggtcctaagaccctcatttcaaaaggggtcccatcacataccctggaggaaggaatgttgcacggaggacggtaagaaggtgaacacagaggcgttgctgggtttcctcactcattagatgataatatttcaacagggctgtccatacttcagtcatgtctctccagtagagtctccataaaaggcccaagaggacagggttcagggagcttccaaatacctgaacacatggagcctcctgaagggtggtgcacccagggtgggcatggaggcaccgtgccccttctcacatgccttgccctatgcatctcttcctctgtgtcctttgtataataagccagtacatgtaagtgagtgtttcccttacttctgtgatctgctccagcaaattaatggaacacaaaggttaattcaagttgacaaccccaagttgaagccagtggatcagaagttctggagcccagacttgtgacgggtgggaatggagaatggttggttgggactaagccttcaacctgtgggatctgaggctgtctccaggtagacagggttggaattgaattggaggatgcccagctggtatccactgaagaattaattgcttgtttggtgcgtggggagaaacccccacacatcggtcacagaagtcctctctgttgattattctggtatgagagcagaggaatgcagttcaggttgtttcttcagaggccgggcgcagtggctcacgtctgtaatcccagcaatttgggaggccaaggtgggtggatcacctgaggtcaggagttcgagaccagcccggccaacatggcaaaaccccgtctctactaaaaatacaaaaaaaaaaggccgggtgtggtggctcacacctgtaaccccagcactttgggaggctgaggcgggcggatcatgaggtcaggagatcgagaccatcctggctaacacggygaaaccccatctctactaaaaatacaaaaaactagccggccgcagtggcgggcgcctgtagtcccagctactcgggaggctgaggcaggagaatggcgtgaacccgggaggcagagcttgcagtgagccgagatggcgccactgcagtccggcgtgggtgaaagagcgagactccgtctcaaaaaaataaaaatacaaatacaaaaaaaaaaacacaaaaaaccatagcctggcgtggtggctcgtgcctgtaatcccagctactcatggggctgaggcaggagaattacttgaacctgggagttggaggttgcagtgagctgagcttgcgccactgcactccagcctgggcaacagtgcaagactccgtctcggaaaaaaataaaaaataaatacaagtacaaaaattagccaggcatcatggtgtgagcctgtagtcccagctactgaggacgctgaggtaggagaatcacttgaaccctggaggaggaggttgcagtgaggcgagatcattttactgcactccagcctggatgacagagtgagactctgtgtcagaaaaaaaaaaaaagctactcagtggctacaagtttggacgttttgaactgtttagttggttactctgaagaaaaaaacttttttatttttttttgcaacagagtcttgctccattgcccaggctgtagtgcagtggcacaatctcggctcactgcaacctccacctcccgggtccaagtgattttcctgccacagcctcccgagtagctgggattataggcatgcaccaccacgcctggctaatttttgtatttttagtagggacagggtttcgccgtgttagccaggctggtctcgaactcctgacctcaagtgatccacccccgttggcctcccaaagtgctgggattacaggtgtgagccactgtgcccagccactgagtagcattttatgactgggttgattaaagcagagaatgtcagctttataaaagggaccaccagtacaatttgaacaaaaacttgggacattgtcaaagttgtccactccgactaaaaggattcttaggtcaggttttgtcaagttacctgcagaagctactgaatgcgatatttatttatttgtttgcttatttatttatgaaacagagtctcactctgtcacccaggctggagtgcagtggtgcaatctcagctcattgcaacctccacctcctgggttcaagcgattctcttgcctcagcctcctgagtagctgggattacgggcatgtgtcaccacacccagctcatttttgtatttttagtagagactgggtttcaccattttggccaggctggtttcaaactcctgacctcaggcgatccaccagcctcagcctcccaaaatgctgggattacaggcatgagccactgcacccggcctgaatttatttttttaagagatagggtcttgctctctggcccaggtgggagtgtagtggcatgatcatggctcactgcagtctcaacctcctgggctcaagcgatcctcctgcctcagcctcttgagtagctgacgctacaggcatgcactaccacacctggctaatttagtctttctatgaaacctaaaaagaatgattggtgagtgatagcagtggataaaattagtcttaaagttgcagcagtgcggttcagcaactattagataaactggtttcaggttagaggccgcttcagcaactaggcttgcaggtaataatttttggagcaatgctgtgtgtcctgagtgcttttccccttggcctttttttttttttttttttttttttgagatggagtctcactctgtcacccatgctggagtgcagtggcgcgatctcggctcactgcaagctccgcctactggattcaagccattctcctgcctcagcctcccgagtagctgggactacaggtgccgaccaccacacccagctagttttttgtatttttagtagagacggggtttcaccgtgttagccaggatggtcttgatctcctgacctcgtgatccacccgcttcagcctcccaaagtgctgggattacaggcgtgggccgccgcgcccagctccccttggcttcttgactctgttgcagctgggtatggtgataatgacccagtccataagatcagcgttcacatgtggctcatgactagaccgcgcgcctccttgtggtggtacggcagtgggatgcacattttcctttgaccagcgttctcccagctgtcgcaccgctcactcccatgctgttacaggtcacctcttgcaggggcatatttgatcrctgggcacttagtgtttgttgttccatcattatgcaaacagccgcctcttgatgaaccttcagtgacccagaagaaggtgtgagaagtgtggctggaccccgctttcggaaatgctctggactcccctaacgtcctggggaattacagggttccttcacatgtttccagttggaagcaagtactccacttactttggcttttgaaaactatttccctagccatcgacgagtacaagccccaggatgctaccaccaacccgtccctgatcctggccgcagcacagatgccygcttaccaggagctggtggaggaggcgattgcctatggccggaagctgggcgggtgagtgcctggactcgggagggtcccagctaggccctcgtgctagtctagttggccttgcttccctccctaactgaattttagttctcaaacaccatgaactcaaggggggaaaaaamccctatctttttgcctatttttgtttattgaagtgtaatctgcatgaagtaacctgcacctgtggtaaatgagcagttcagagagttttgccaatgtgtgtaccctgtaaataccaccccagtcaagatgcagagcacttgcagacccccacaggcccctcctcccctcctgtagtcagtctccccagctctggtaacacttaccttctggctgtcattttattttttacttttcagacggagtctcgctgtgtcacccaggctggagtatagtggagcaatcttggctcactacaacttccgcctccctggtgcaagcaattctcctgcctcagcttcccaattagctgggcttacaggtgtgtgccaccactcctggctcatttttgtatttttttttttttttttttttgagacagagttttgcttttgttgtccaggctggagtgcactggcacaatctcggctcaccgcaacctctgcctcccagattcaagcgattctcctgcctcagcctgccgagcagctgggattacaggcatgcgccatcacacctggctataatttttgtatttttggtggagacagggtttcaccatgttggccaggccggtctcgaacttcttacctcaagtgatccacctgccttggcctcccacagtgctcggattacagacgtgagccaccgtgcctggctttttaattttttaatagcttttataactcccagaatgttctctggtacctgtttgcagtagctccccactcccttacccaaccaagcaactgtagagccctcttcatgcctgtggctttgcatattttagatgtcattttagattctcttcagggtaataattcaaagcttgaagatggtgccgagcaggcaacgtgggcaccacacaggagcaggtccctctctggtactggctttgcttaggtccaggtggctggtgagtggctcccctgaccatgttgtgacagccactctggacactgagtctgaccctctcctctctcttcttagctcccttttcctcatctcgtggtgttgcacccctgtggcatcagtgaggccttggtgctcctgttattgggtgacattggtgcctttgcttggctgggtgatcaacagatgagccctgcacccatgtccagatggccccaaaattttttttttttttttttttgagatagagtttggctctgtcacctaggctggagtgcagtgtcacaatctcagctcactgcagcctctacatcctaggctcaagccagcctcccacctcagcctcccaagtagctgggactacaggtgcacgccaccacacctggctaatatttgtatttgtttttagaggcagggtttcaccatgttgccctagctggtttcgaactcctgagcttgagcagtctgcccaccttggcctgccagggtgctgtgattacaggcgtgagccactgcacccagtctggcccaagaattctaacctctgagcgtctagctgaagatcttcctgtgtgtagtgggctaacaaggctgctcagattttggaacagaatcatggacttcactgggtgtctgtccaataactttgaagagatagaaaatataatattttgcaagtgccaaaagatagagggatgcagtttgggatgatgaaaagagctctggagatggatggtgatggttgtacagaactgtgaatgtgctgaatacattttaaaatggtgggctgggggcagtggtgcacgcctgtaaccccagtgctttggtaggccaagatgggaggatcccttcagcctaagagttcgagaacagtctaggcaatagggcaaaactctgtctctacaaaaaaatataaaaattagctgggcatgggccaggcgtggtggctcacgcctgtaatcccagcactttgagaggccaagacaggcggatcacgaggtcaggagatcgagaccatcctggctaacacggtgaaaccccgtctccaccaaaaatacaaaaaaattagccgggcacagtggcgggcgcctgtagtcccagctactcaggaggttgaggcaggagaatggcgtgaaccgcggggggcagagctggcagagccgagattgtgccactgcactccagcctgggcgacagagtgacactccatctcaacaaaacaaaaaaattagccaggtatagaggtgtgcagctgtagtcccagctacttgggaggctgaggcaggaggatcacttgagcccgggaggtcaaggctgtaatgagccataatcacactactgtgcttccagccttagctggagaccctgtcttggggraaaaaaaaaaggataagatgggaaattttatgttatatgtattatttggccacaataaaaaaatgttttaagagaaaaaaaaagatggagggaaggaaatttggcaaagaaataacagaatttattttgtagagtcttgtgcacttgaacctcagaagcttctttttttttttcttgagatggagtctcgctctgtcgctcaggctggagtgcagtggcacgatctctgctcactgcaagctccacctcccaggttcacgtcattctcctgcctcagcctccctagtaactaggactacaggcacccgccaccatgcccagctaattttttaatatttttagtggagacggggtttcaccgtgttagccaggatggtcttgatctcctgacctcatgatccgcccacctcggcctcccaaagtgctgggattacaggcgtgagccaccgcacctggcgaacctcagaagcttctaacctgctttttttccctttgaatttcaggtcacaagaggaccagattaaaaatgctattgataaactttttgtgttgtttggagcagaaatactaaagaagattccgggccgagtatccacagaagtagacgcaaggtaaggatgcttgctcctgcactggatgggctggtcaggtgtccacagttgcacacgtggatgccaacatgaggtcaaggggctgctccacccatggtcttcatcccaagggcccaagaggaggtttattttgagctctcccacagttggtagtgatgaccaagagctccttgtttagcaactgatctctagtgttttttatttttatttttatttatttttgagatggagtctcgcactgtcacccaggctggagtacagtggcgcaatctcagctcactgcaacctctgtctcccggcttgaagcgtttctctgcctcagcctcccaagtagctgagattacaggcacctgccaccatgcccagctaatttgttgtatttttaatagagatggggtttgaccattttggccaggctggtcttgaactcctgacgtcatgatccacctgcctcggcctcccaaagtgctgggatcacaggcatgagccactgtgcccggctgctagtgttttttgttttgatttgttttgtttgttttttgagacagagtctcgctctgttgccagtgtagagtgcagtggtgtgatctcagctcactgcaaccttcacctcccgggttcaagcgattctcctgcctcagcctcccaagtagctgggactacagacacccgccaccatacccagctaatttttttgtatttttagtagcgacagggtttcaccatgttggccaggatggtctcgatcccttgaccttgtgatcttcccgcctcagcctcccaaagtgttgggattacaggcgtgagccacggcacctggcccagtgttttttaatacaaattatagcctatggatcccactgaggacctctgtttgtgagactgggtgtgagttgctgtcagagccattctgcaaacctccagtgaggggaaggttgagggcagtggttggtgctcacggtggtgctgctcaaaactgacaggcagacacycggcctccagcttgctctgcgtggtgggcaacctgcgtgatctgaggggatgggttcttcttgctcctacaggctctcctttgataaagatgcgatggtggccagagccaggcggctcatcgagctctacaaggaagctgggatcagcaaggaccgaattcttataaagctgtcatcaacctgggaaggaattcaggctggaaagtaagtggtcccccacaaggaaggagctctcagagatttttcctctgttggagcagggtctacatggcatcaggcaagtttgactctctcagccctggggaatgccagactggggagcacagcccacagcttggacttgaccagctcatgtcagcctagatctgccctctgctccagagccagctccctcacttgctggtgatcagaaatgagggatttcccaggaagtaccatccacccactcagcagagaagaaaagccactagttagcacctgcagattcagattctgtccttcctctgtcctgatcaacacaagcctatgtttacatgatttttaaaaagtaaactattgttatataaaatatatgctggctgggcaagatggctcatgcctgtaatcccagcaatttgggaggctgagatgggaggatcacttgagcccaggagttccagaccagcctgggcaacaaagtgaaaccttgtctctacaaaaatataaagaaattttaggctgggcacggtggctcccagcactttgggaggccgaggcgtggggatcacgaggtcaggagatcgagaccatcctggctaacacggtgaaaccccgactccactaaaaaatataaaaaattagccgggcatggtggcacacacctgtagtcccatttaggaggctgaggcaggagaattgcttgaacccaggaggcgaaggttgcagttagctgagatcacaccactgcactccagtctgggtgacagagcaagactctgtctcaaaaagaaaagaaaacttttaggccgggcacggtggctcatacctgtaatcctagcactctggaagcctgaggtgggtagatcacctgaggtcaggagttcgagaccaggctggccaagatagtggaaccccgtctctaccaaaactacaaaaaatttagctgggcgtggtggcaggtgcctgtaatcctagctacatgggaggctgaagcaggagaatcacttcaacctgggaggtggacgttgcagtgagccgagattgcaccattgtactccagcctgggtgacagaatgagactccatctcaaaaaaaaaaaaaaaaaagaaaagaaaaactagcccacccctgtgattccagctacttaggaggctgaggcgggaggatcgcttgagcctgggaagttgaggttccagtagctatgatcgtaccactgcactccagcctgggtgacagagtgagaccctgtctcagaaaaaccaaaccaaacatatgtatgttcagagtggaagagacagaaaatgtataaaacaaagtaaaactcctctatgatgttctcacccagaagcagccaatgctatactcaaataattcgcatcaggaagaggtgttttgtttccacatctgtgtgtctgcatgttctaccacctgccatcactgacctgctctgagatagcatctcactttttcaccacggctggagtgcagtggcacgaacttggctcactgcagccttgactccaggctcaagctatctttccacctcagtcccccaagtggctgggatgacaagcacacataccactcctgggtaatttcaccacgttccccaggctggtctcgaacccctgggctcaagagatctctacccatcttggcctcccaaagtgctgggattataggcatgagccattgtgcctggcctcatttgtgtgtttttttgtttttttttgtttttgagacggagtttcattctcgtccatgctggagtgcaatggtgctatctcagctcactgcaacctccacctctggggttcaagagattctcctgcctcagcctccggagtagctgggattacaggcaggcgccaccactcccgcctaattttatatttttagtagagatggggtttctcatgttagtcaggctgatctcaaactcccagcctcaggtgatccgcccgcctcggcctcccaaagtgttgggatcacaggtttgagccactgcacctggccggaccatttgtttttatatgttggaaaatactccattttatggataggccacagttattcatctgttggtggacacctggtcagtttccatctcttgagctgtgatgtatattgctgtggtcggtttccatttctcgggctgtgatgtatgctgctgctctgaacacatctgctgctatgaacacatctgctgctctgaacacagatgtgcaagttttgtcctggacatgtttttctgggttctcgctgggcatatgcctaggagtggagtctctgggtggactgctggaggaactgcannnnnnnnnnnnnnnnnnnnnnnnnnnnnnnnnnnnnnnnnnnnnnnnnnnnnnnnnnnnnnnnnnnnnnnnnnnnnnnnnnnnnnnnnnnnnnnnnnnnnnnnnnnnnnnnnnnnnnnnnnnnnnnnnnnnnnnnnnnnnnnnnnnnnnnnnnnnnnnnnnnnnnnnnnnnnnnnnnnnnnnnnnnnnnnnnnnnnnnnnnnnnnnnnnnnnnnnnnnnnnnnnnnnnnnnnnnnnnnnnnnnnnnnnnnnnnnnnnnnnnnnnnnnnnnnnnnnnnnnnnnnnnnnnnnnnnnnnnnnnnnnnnnnnnnnnnnnnnnnnnnnnnnnnnnnnnnnnnnnnnnnnnnnnnnnnnnnnnnnnnnnnnnnnnnnnnnnnnnnnnnnnnnnnnnnnnnnnnnnnnnnnnnnnnnnnnnnnnnnnnnnnnnnnnnnnnnnnnnnnnnnnnnnnnnnnnnnnnnnnnnnnnnnnnnnnnnnnnnnnnnnnnnnnnnnnnnnnnnnnnnnnnnnnnnnnnnnnnnnnnnnnnnnnnnnnnnnnnnnnnnnnnnnnnnnnnnnnnnnnnnnnnnnnnnnnnnnnnnnnnnnnnnnnnnnnnnnnnnnnnnnnnnnnnnnnnnnnnnnnnnnnnnnnnnnnnnnnnnnnnnnnnnnnnnnnnnnnnnnnnnnnnnnnnnnnnnnnnnnnnnnnnnnnnnnnnnnnnnnnnnnnnnnnnnnnnnnnnnnnnnnnnnnnnnnnnnnnnnnnnnnnnnnnnnnnnnnnnnnnnnnnnnnnnnnnnnnnnnnnnnnnnnnnnnnnnnnnnnnnnnnnnnnnnnnnnnnnnnnnnnnnnnnnnnnnnnnnnnnnnnnnnnnnnnnnnnnnnnnnnnnnnnnnnnnnnnnnnnnnnnnnnnnnnnnnnnnnnnnnnnnnnnnnnnnnnnnnnnnnnnnnnnnnnnnnnnnnnnnnnnnnnnnnnnnnnnnnnnnnnnnnnnnnnnnnnnnnnnnnnnnnnnnnnnnnnnnnnnnnnnnnnnnnnnnnnnnnnnnnnnnnnnnnnnnnnnnnnnnnnnnnnnnnnnnnnnnnnnnnnnnnnnnnnnnnnnnnnnnnnnnnnnnnnnnnnnnnnnnnnnnnnnnnnnnnnnnnnnnnnnnnnnnnnnnnnnnnnnnnnnnnnnnnnnnnnnnnnnnnnnnnnnnnnnnnnnnnnnnnnnnnnnnnnnnnnnnnnnnnnnnnnnnnnnnnnnnnnnnnnnnnnnnnnnnnnnnnnnnnnnnnnnnnnnnnnnnnnnnnnnnnnnnnnnnnnnnnnnnnnnnnnnnnnnnnnnnnnnnnnnnnnnnnnnnnnnnnnnnnnnnnnnnnnnnnnnnnnnnnnnnnnnnnnnnnnnnnnnnnnnnnnnnnnnnnnnnnnnnnnnnnnnnnnnnnnnnnnnnnnnnnnnnnnnnnnnnnnnnnnnnnnnnnnnnnnnnnnnnnnnnnnnnnnnnnnnnnnnnnnnnnnnnnnnnnnnnnnnnnnnnnnnnnnnnnnnnnnnnnnnnnnnnnnnnnnnnnnnnnnnnnnnnnnnnnnnnnnnnnnnnnnnnnnnnnnnnnnnnnnnnnnnnnnnnnnnnnnnnnnnnnnnnnnnnnnnnnnnnnnnnnnnnnnnnnnnnnnnnnnnnnnnnnnnnnnnnnnnnnnnnnnnnnnnnnnnnnnnnnnnnnnnnnnnnnnnnnnnnnnnnnnnnnnnnnnnnnnnnnnnnnnnnnnnnnnnnnnnnnnnnnnnnnnnnnnnnnnnnnnnnnnnnnnnnnnnnnnnnnnnnnnnnnnnnnnnnnnnnnnnnnnnnnnnnnnnnnnnnnnnnnnnnnnnnnnnnnnnnnnnnnnnnnnnnnnnnnnnnnnnnnnnnnnnnnnnnnnnnnnnnnnnnnnnnnnnnnnnnnnnnnnnnnnnnnnnnnnnnnnnnnnnnnnnnnnnnnnnnnnnnnnnnnnnnnnnnnnnnnnnnnnnnnnnnnnnnnnnnnnnnnnnnnnnnnnnnnnnnnnnnnnnnnnnnnnnnnnnnnnnnnnnnnnnnnnnnnnnnnnnnnnnnnnnnnnnnnnnnnnnnnnnnnnnnnnnnnnnnnnnnnnnnnnnnnnnnnnnnnnnnnnnnnnnnnnnnnnnnnnnnnnnnnnnnnnnnnnnnnnnnnnnnnnnnnnnnnnnnnnnnnnnnnnnnnnnnnnnnnnnnnnnnnnnnnnnnnnnnnnnnnnnnnnnnnnnnnnnnnnnnnnnnnnnnnnnnnnnnnnnnnnnnnnnnnnnnnnnnnnnnnnnnnnnnnnnnnnnnnnnnnnnnnnnnnnnnnnnnnnnnnnnnnnnnnnnnnnnnnnnnnnnnnnnnnnnnnnnnnnnnnnnnnnnnnnnnnnnnnnnnnnnnnnnnnnnnnnnnnnnnnnnnnnnnnnnnnnnnnnnnnnnnnnnnnnnnnnnnnnnnnnnnnnnnnnnnnnnnnnnnnnnnnnnnnnnnnnnnnnnnnnnnnnnnnnnnnnnnnnnnnnnnnnnnnnnnnnnnnnnnnnnnnnnnnnnnnnnnnnnnnnnnnnnnnnnnnnnnnnnnnnnnnnnnnnnnnnnnnnnnnnnnnnnnnnnnnnnnnnnnnnnnnnnnnnnnnnnnnnnnnnnnnnnnnnnnnnnnnnnnnnnnnnnnnnnnnnnnnnnnnnnnnnnnnnnnnnnnnnnnnnnnnnnnnnnnnnnnnnnnnnnnnnnnnnnnnnnnnnnnnnnnnnnnnnnnnnnnnnnnnnnnnnnnnnnnnnnnnnnnnnnnnnnnnnnnnnnnnnnnnnnnnnnnnnnnnnnnnnnnnnnnnnnnnnnnnnnnnnnnnnnnnnnnnnnnnnnnnnnnnnnnnnnnnnnnnnnnnnnnnnnnnnnnnnnnnnnnnnnnnnnnnnnnnnnnnnnnnnnnnnnnnnnnnnnnnnnnnnnnnnnnnnnnnnnnnnnnnnnnnnnnnnnnnnnnnnnnnnnnnnnnnnnnnnnnnnnnnnnnnnnnnnnnnnnnnnnnnnnnnnnnnnnnnnnnnnnnnnnnnnnnnnnnnnnnnnnnnnnnnnnnnnnnnnnnnnnnnnnnnnnnnnnnnnnnnnnnnnnnnnnnnnnnnnnnnnnnnnnnnnnnnnnnnnnnnnnnnnnnnnnnnnnnnnnnnnnnnnnnnnnnnnnnnnnnnnnnnnnnnnnnnnnnnnnnnnnnnnnnnnnnnnnnnnnnnnnnnnnnnnnnnnnnnnnnnnnnnnnnnnnnnnnnnnnnnnnnnnnnnnnnnnnnnnnnnnnnnnnnnnnnnnnnnnnnnnnnnnnnnnnnnnnnnnnnnnnnnnnnnnnnnnnnnnnnnnnnnnnnnnnnnnnnnnnnnnnnnnnnnnnnnnnnnnnnnnnnnnnnnnnnnnnnnnnnnnnnnnnnnnnnnnnnnnnnnnnnnnnnnnnnnnnnnnnnnnnnnnnnnnnnnnnnnnnnnnnnnnnnnnnnnnnnnnnnnnnnnnnnnnnnnnnnnnnnnnnnnnnnnnnnnnnnnnnnnnnnnnnnnnnnnnnnnnnnnnnnnnnnnnnnnnnnnnnnnnnnnnnnnnnnnnnnnnnnnnnnnnnnnnnnnnnnnnnnnnnnnnnnnnnnnnnnnnnnnnnnnnnnnnnnnnnnnnnnnnnnnnnnnnnnnnnnnnnnnnnnnnnnnnnnnnnnnnnnnnnnnnnnnnnnnnnnnnnnnnnnnnnnnnnnnnnnnnnnnnnnnnnnnnnnnnnnnnnnnnnnnnnnnnnnnnnnn

SEQ ID NO: 94207 - DNA, 71201 bp, Homo sapiens
agacaatgataagtatgataaagaataataaggcaagagaataaagagtaaagaggtaatagtggtttttttgagggctattcctgatagtagggtagtgagggaaatcagctctaaggaagtaacttttgattagagatctcagtgatatgaaagtatgagccatcagaagaatattcttggtaacagaaacaggaagtataaagactctgaggtagcaatgagcttggtgtgtttgaggaatattaaagttagagtgtaaaagctccaggaatgataggaaataaagtgaggagcagcagggccatatcacacaggaccttgtaggccacagtaaggaggagtggatgggagataggaaaagcagattgaaggctgttgcagtagtccaggtgaatttaaatataaaacccataggtagaaatgatagtccttggcaagtaatggaattgtggatgggaagtgggaaatcaaggtcattgccaatgtttgaatatgggtgatttaggaaaatgaggtgccaggaggaggagtttggaaggattttggttcaattttggatatgttagtgtttcagatgttaaaggggaatatttctgggtatttatcataaaagtagataactaatagggagtagagcaggacattagcatcagtaaatacaaacttgacaggcaaaagaggaagctgtggaatgtgtagcagtgacaggagagaagatggggtagagttcttgattctacatttaaacatatatagtttcattcccagtacttagaataagtgaaggatttttttttctcattctctcaggctttctgaatttctcatatttcgtttttatttttaaatttctatctcaatctctctaattctactgttagcattaaggagtttgctaaagacctgaatgatagggttgggaaggtgagggatatgaggaagactggttaagggataaggatctgaagtttgcagtttcttagagggctagcagggagagcaactgagtaaattgggtcctgttccagaacaaggcatgtaggcatgtttgtgctytggttccctccatttccctttgcttgcctcactgtgtttacccaactacatcctgctttgtgttaatcctcatctctatgtttttttgtcttgtctcattataaggattcatcaaacgtgaggaagcctttggaaaccgggcaccgttgttccagctcctcttccctccctgtcatccatgacccttctgtgtttctcctcggtccccaactctaccttccccaaccacagttcctgtccccagatgtcctgatgcccaccatggcaggggagcccaatagactcccaggtaactcccccaaatctaatattatatgccagaatttggtmccttttcaggggcctccaagggtcaaatcagtatacctatggggaggggggtatcccaaggtggagtggtgtgaagatatgaattactgcttcaaagtcgtgcatttatctagataaatattaaatcatttgttgggcaccatgattcttagaccaagggtttagaccagcacccctagagtctgtctacttacgaaaatgacctgcttcagtcatgacagaataagcttttaactgacaaaggggagttaatacccagtctttgggacatccccagaacagaaatggtcatctctccttctatcctctgagctagttttctccccttctatcctctgagtctcagctgagggatggtctaggaagataaggaatgagtgggagaattggaaagaccctttacatggagtacccacaccatgtgtacagacccagacaattgtggggaaggtgggcaatatcattttggctttctttgaccttccgagtgagatgttctcttttttcccctcatgcactggatgtacaagcttgaggcagtggttctcaatggataaaggggatgtaccaccggtatctagtgggtagaggccagggatgtcctcaacagcacagccattattgtcacttgctcagttgttgttgtaaaccctcagagtcagctgaactattttaggccaaacatactgtttttgcaaagtatttttcattaataaatcacacaatgcacagggcagtctctccccaaccccaacaaagaattatcagcccaagataccaagagtgccaaagttgaataaatgtataagaaaaggcattccacattagatctcagagatcaaacaaaggcagcttaactgaagtgaaggtaacattttaagaaaagttggagaaacaaaaaaaaagcaaggcacagcgtctcacacctgtaattccagcactttgggaggccaagatgggaggatgacttgagtccagcagttcgagaccagcctgggcaacacagtgagatcccgtctctattttttttaaaaagaaaagctgcgtgaggttttggtatggtggctctaggagtatagtcatcacaaagggagtatacgtttgccatatattgctatatattagggagcccttcttttgtaggtgtgtgtatagtggatgagagattatagtggagggaggtagaggtatggcaacatccatgagactgtttcatttgcccaggttggaggtatgagatttgattttgatgtatattaagaattttaagaaatggaatcaaaagcacagcttgattcattctttcccttgtatgtatgctcttggaggagtagggaattgggctacacagctaggcatggctctctgggaaggagaatggttttctgaagatgctcagtctttgggtttcttttctttccccaggaacttcaaggagtgtccagcagtttctggctatgtgtgacaggggtgaaacttcccaaggggccaagtacacaggaaggactttgaactaccagagcctcccccatcgctccagaacagacaactcctgggcaccctggtcagagaccaaccagcatattgggaccagattcctgactactccagggtgcaatcctcaactaacctacactgccacactaccagaaagaagcaagggccttcaggttcctcacactcagtcctggagtgatcttttccattcaccctcccaccctcccattgttcatcctgtgtacccaccatctagcagtcttcatgtacccctgaggtcagcttggaattcagatcctgttccagggtcccgaacccctggtcctcgaagagtagatatgcccccagatgatgactggaggcaaagcagttatgcctcccactctggacacaggagaacagtgggagaggggtttctgtttgttctatcagatgctcccagaagagagcagatcagggctagagtcctgcagcacagtcaatggtaaaggttattcctttcctttcctggagctacacctttctttgtaaaactgtactgtgggccgggcgcggtggctcacacctgtaatcccagcactttgggaggctgaggcgggtggatcacgaggtcaggagattgagaccatcctggccaacatggtgaaaccccgtctctaccaaaatacaaaaaattagccaggcgtgacggtgcgtgcctgtagtcccaactactcggaaggctgaggcaggagaattgcttgaacccgggaggcagaggttgcagtgagccgagatcgcaccactgcactccagcttggcaatagagtgagactccatctcaaaaaacaaaacaaaacaacaacaaaataaactactgtggcagcgttggtaccctgcatcactgccatggttgtgctattctcatctcaacatagaattggtgggttctcctaagggtgtcaggaacctctaaaaagatgtgattctttgggaggggatatttgaaattccaacttccattccccctagcaaaaggaagcagctgctgtttaagggttttatctgagccactttaaagatgaatccatggtattactctggatactagccattccttaggattttaaggtcacattttattcctggatgctttatgtccccacctccacctgagccctcatcctctgttccctactatactcccaayttctactctttgttttatccacctatccctattacctgaccctttgtcttccctgtctcccatccttggggggacatgtagccctgtggtcatggttctgatgacatcatcagggcagcccccctgcccaggtattatggcctgtcagcattccctgtgccctccaaaccttaggcctagaaygcggagctgccaacataacattcacccttttgaacagatggagtcaggcacactaacacagccttctgtcctcaataacacagccattattgccacttgctcagtcgtcartgtaaaccctcagagtcagctgaactattttaggccaaacatactgtttttgtaaagtatttttcattaataaatctataagacagttctatttaattccttgtcattcttccctttgtatgctcttgctttctttgtattggggctggaagtctggataaatatatgaagtggcttttgactgagtggaagtgaggagccagagacgagttgaaggatatacaatcaaggtgggaatcaatgggtcctaaaatagggtgcctttcctttctagtattgctgctaggatgtttcccatccctttcctgacagagcattcagtactcagtacattatacacttccttcctcccctccttaggaagattttctggggattcaagctcttcttacagactcactcctgatcaatgtactccaggtgccttccctctatcttataagtttgtgacgtgcctcctgtcccttccttcctctccttccgtgggggcctctccctttcccttcccctgtggtgttatggcccttccatgccagaaagatccattttcacctgtgcctcactcccgagactcttccctctaaaaaatagcttgtgggttccctttttggaaaaaatccattgttgggtctttcccttcctcttttcctggggtctcaggatagaaattgacacaaagaagaggtagaaaggtactccttggaccttcggactactacttacttaccaccatgcattatgaacagattctgagcacatgtattattgagcaggaggatgggcaggaattggttgttccatcccacttggatcctgcaccatcaagatatatagagcttagtggatatgctggtccctgtccatgattcaacatatctcctggtgtcgtggacacactcatctaataatttttgatgaacagtcagttcttgcccctctaccccctttcccatgagtgtcagtcaccgtggtctctataaaggttccataagtcacctgggcccagattctgtgcatgtgcagaaataaggaattaatttccaattccctatttactcctctgccttccaggaggaggttgtatccttttcaggtgaattcttcagattctttgcacatctcttggtgtcatcccctttattccccttacctgttttgacaaactatggcgcctaaattgctctagctgcagtcttattctgtgctttcagactcttgacaattccagactctaaacacaaaggccagaattctctttcaaactccattttggatggtcccttctccactctagaacctacaatgcttcctctattctctggtcccctaccaacccttcagtattcagatctggtagctaaatcgttatacatttctctattagtaggagatcctgaggtttaatcacgtcttctcagtttactgggaatgccatgagagcgggtgtgtttcctcgcagtcgttcgatcgcagcacctcctcattcttcattctgcatgcaaagaattttaacctgatcccttggcctcgtcctgtttctctcctagcttcagtaattttgcccaagtccctagagcctaccccgcccccacccccgcacgcgcagtgcatgccggtcttagcccctctgtagggaaagagggtccgccatgttccccggcggcgccgccgcttggctctggtagccgccgcccccgcccccaaccccgcccggcccagagcctagccgagccccgggcccagcatggccgccccggagccggcccgggctgcaccgcccccacccccgcccccgccgccccctcccggggctgaccgcgtcgtcaaaggtgagaggtggacgaaaccctgggggcctggcctgaagagctagctgtgtgtgagggcgggcgggagaccgtcccctcgggagtgggcccggaagggcgggcgagtgactggctgcctcccttggggagtggcccctgggcgggcccctgctgggcagggctgagtcggtggcagtggttccgcggtctcccggttgctttcaggccggggcggaggttttgcttccgtggcttcctagcccaaggggtgaggctgttagctgcagtgagcccgttttctcttcactcggcctgtcaaagcggcgcaggggccgcgattagcttcctgccccgcgacagctgcacttctggcttgccggggcgaaccgaggggctcggagaccttcagccacgcgaggcccgccagtgagcagtcagaaatcacctcggctttggcccacgcctgctccccggtgacagtcgtccgccctatccgcgtctagctggcgacaaccgcaggggttcacttttggccgtcaggtgccacccggagcagaaattaggggaaccttgtgggattggatcacggtgaagggtcggggcaggaattggaaggccagcctttatagtgcagaaagggagaaaaagcagcataaacgaaaaaaaaaattcttgtggatagcaagtatttacttagaaaaccatcaacactttggtcaaaaggagttacccctcccttacaaacacacacccacacattcatcctagacgaaaaagttaaatgtttctcagccagggcagaatttatggatgtttacccacaacaggtcagcagattaatttaaaatagagaaattgagggctaattgagagttgcttaagattccaagcttcctgggagagcctaccaacctcaaacactgctgtggaggtgaaaaacaattgaaatgattctctttaccatgtagcttgattgataaattgaaatcgtagaatgaacttttccttatttgtattgtatttatttttaaaatataggtacttttgttttcattcagcttctcaaatacactggcacagtatttaaacaccgttagcctactttttgaaatctgactcatatgtttccattaaaatatttaaaaacaaggaaaccttttttcttttttttttttaattaaaaattttcaacctgagccttcttcggttcttaaaagaataatactaatttggcctggcgtggtggctcacatctgtaatcccagcactttcggatgctgaggcaggcggatcgcttgaactcaggagttggagaccagcctgggcaacatggcgaaaccttttctctaccaaaaatacaaaaaataaaaattagccgggcatggtggcgcgcccctgtagtcccagcggatcgggaggctgaggcacgagaatcactggagcccgagaggcagaagttgcagtgagccgagatttgcgccagtgtgctccaacctggacgacagagccagaccctgtctccaaaaacaaaaacaaaaacaaaaacaaaacactgatttgcacctaggcttaagttagtagtatatccagttgggccaggcattggaatgagctgaataacgagtttatggaatccttaatacagagaaatcttaaaaaaaaaatagtaatgcagacattcattctatcaagaaatcctggagttttgtgggggtgggaacgggacattggctacctcttcattttctgactgtatttctgtgttgtgtgttcatttccctgggcacttttcaccagactgttagatggggtaaccaatcacattcctgaacaatgagtttatgctatccttacgtttgtgaatcttcttattccttgtcatatatatggtaatgttttttctgtactgctttaatgcagtgaaaataagattccaaacataaggcagattccttaggggtgagttgtgagtccaaggcagtcatatttgcaggttattggtgtggaataaaagccatttgatttagataaataggaaaggagcttgttaatatagaaaattatagttaaataaagcttatggttatcatatttctggtgcttcattgtgccctcttcatagagacaactttcatttctttatggaatttgttaaccagttggaattcctgtatggattatatgttttaaaatggtgtgtaacagactaatttgcactgctcatggagtctcctgcatttactgggaaattcacctttcttacagatccagaaattcacttttaaatttcatcttcaggattcttccttgtcttttattcagtaattatactataatgtgatacctgatattagagaatactggttgcctgatgataaatgatgtgagttcagcttaagtttaacttgttaaaatccaaatttcttttaagtccacaatgtggtggtagttttgtatcgatacattttcatagtagtgatattatggagactgtctgttggcattgaatgcaagtagtctttttctccctggaattttttttttttttttgagacggagtttcactcttgttgcccaagtggagtgcagtggcgcgatctctactcactgcaacctctgcctcctgggttcaagcgattctcctgcctcagcctcccgagtagctgggattataggtgcgcgccaccatgcccggttaattttttgtattttttagcagagacggggtttcaccatgttggccaggctggtctcaaactcctgacctcatgatcctcccaccgtggcctcccaaagtgttgggattacaggcgtgagccaccgcgcccggcctgcctccctggaacttcttagtgtcaaaattttatactccatgcttgtagtcataaggcctacattttatggtcatgtaggtttttaagggtgtataggtctttctgtgtttaagatcagatacctgaaattcactttttgtgaagtttgggagcttggaatactgtaggtgattcatgagtaaatgtgatgagcttgtcactaaaattattagtggtaattccatgtcattgattatgggtcattaggtttttggttgattaaattcagttctgagcctactccagctgctggctcaagtcaaattcttcccctgtttgaaagttgatctaacccacctgattaagcaagatggtatatacccttttaattatattctattaagcattctttagctatgtaggaaataagaaagtggaaaaaaattaggaaaaatatctaaccgtatctgcatgtgtgctttcttaccacatcagcaaagctggtataggtaattgaagcacaaaatcctgaatttatatatattgctttccctcctccccacaaagtttacttgacctgaattgcccagatacctccttttttccccagatacttaaaaaatgtacgttttgctttgtataccaggttctagatttgtaaagctggattgtctcttgagattatcaagactgttagtattaataaaaaattcacctttttacttagagagcattgtcagtattgggcatatgttcattttagcacctacaatgtgagtcattttcttaacattattttatttcatgggttatagtaacctcaaattatcagactttcagattgaaccaaaatgctgaatttatgtgttttaattttttttaagctaaagtatttctgattgacaacgttagaattcatttggattctgttgccagttgccctgcttataaatctgaagtcatttggctaaagtgttttctagtagctttcctttaggaggattactttttgtttatttatttatttatttatttatttatttttgagatggagtttcgctcttcttgcctagactggagtgcaatggcgcaatctcggctcactgcaacctccacctcccgggttcaaacgattctcctgcctcaacctcccaagtagctgggattacaggcatgtgccaccacgcccggctaattttgtatttttagtagagacgacatttctccatgttggtcaggctggtctcgatctcctgacctcaggtgatccacccaccctggcctcccaaaatgctgggattataggcatgagccaccgtgcctagccagattacttattttcagataacccatatagccttggtgtgacatagctacttcagtgtttcttgctagttctatttcattatattttaaagcagcttgaattttaatttttgtttacaaagtctattttgtggacttatctgtgtaaaaagaactagaaattatttttcttttactttccactctcattactgttaaccatactaaaataaatcttcaggccaggcgcagcagtggttcatgcctgtaatcccagcactttgggaggccgaggcggggggatcacttgaggtcaggagtttgagactagcctggccaacatggtgaaaccccatctctactaaaaatacaaaaatttggctgggcacagtggctcacgcctgtaatcccagcactttgggaggctgaggcaggtggatcacgagatcaggagttcgagaccagcctgaccaacatggtgaaaccccgtctctactaaaaatacaaaaattagcctggtgtggtggtacacgcctgtaatcccagctactcgggaggctgaggcaggagaatcgcttgaacctgcgaggcggagattgcagtgagccgagttcatgccactgcactccagcctgggcgacagagcaagactgtcaaaaaaaaaaaaaaaaaaaaaaaaaaaaaacaataaaaacaaacaaacaaaaattagcagggtgtggtggcacgcacctgtaatcctaactacttgggaggctgaggcaggagaatcacttgaacctgagaagtggaggctgcagtgagccgagattgtgccactgcaccctgcctgggtgacagagcgatattccgtctcaaataaataaaaataaataaataaaataaatcttcagtaccatgtgtcctagtgaaagcaaaggaacagaaagagagagagaaaaagagtgtgaggggatggggtgagagggagagggagagggaacactatggtaacaagttaccttaaaaggaaaatgccaagttggaaatacagcttagtagtgaggcaaaagcttcaggttccagagctattgaatgaattggcaagagttgtaaggaaaagtttggtaaaaggaccttgatttattaaacaaagcgtgccaatcatatgacctcatttcaccataaaaaatgttttttatacacagagatgaaataagctgaagctaattgggcatcgtctgtgtatggtatgtaaaatttattttggaacatcacagtcgtgaaatagcaaatatttattaaatgtctgctgtatcacaaaactgtaggagaacaacaaaagtacaaaatataaaatacagacttggttcatgaataaatattcatgaaaaattaacaatatatgacataaggacaggtatagttaataattgccaggtaagttgctgagcccgcaagttgtcagttcaaaggaggtagtgatgactctggactggaatggtctaggaagggcttgtgtagaagcaaaggggccttgaaggatggttaggattaaaatagaggattgggaccatttatttgtgcagtgtttattgagtaccagctttgtaccaggcattgtgctaggcattgatgatacagaagtgaataggatattaagtaagatagattctcttgtagtgccggcattctagtgggggagacactattataaataaataatgtaatgaatttggtacaaagcgctactggagctgtaaagaagggattggctatcttactttgagggaaagcgtcactgagaggataatgtttcgaggtagtccttgaaggatgagtagaatttcaccagaaagtggggctagagtaggtgtaacagaagcagaaaggcatggagtttgaaaaaagcatgaaatgtatggcaaaagtatgtgaagtgcttggcaaggagtgacaggaatgaagttagaaaagatcttttgtattacaagttgaggagctaaaacttaagctgttaagcagtatagcagtatatagtacctggatgattaaaagcacaagctctggagtcagactgcctgggtttgaatcctagctctactacttaataaccttcttgccatggacaagatacttaacatctccaagccttaattttcttatctgtaaagtagagctaataaaatcttattatagggtttttggagaattaatagagaccgtgcatataaagtaggtaccacagttcctggcctggcacatggtaagtactcaaccaatggtaaccatcaccattattattattattattattattgaaggttttaaagtagaatagtgacccagtatcttgttttttgatggctaattctggccatattgtgtgcaacaaattattggagggcaagaagcttaaagcaggttgtctaattagaagattaatggagtagtccaagtgagggatgaccaaggcatgaaaaactagatacgacacaaattcctactaatattagaaggtaagtatattggatgagtgattgagtatggaagtgaaataggtgagcaacagttttttaggaaacaataatcagaataattttgctttagggctagattaaattgggcaattgtagttagatgcaaagattggaatgatatgtaaaagactgagaatggttaaattgagaagaaccttgaaaataagatccaaagttttctttttctttattctttagtcattaagaaactaccccaagtttttgagtaggttaatttactactttgttcagtcaaagaggaagaagagatttttctagtaaatgataagaacttgaactagtattgcaacagtggagatttaagaaaattgaatttgaagaatcaataggacttagagttcagaaagagaacaatgacattaagtgtgagtgatagagaatggtgataccttaacaggtgtaagccaggaaggggagccaattttgagggaaaggtatatttaaaaaccaccacaaattaaaagagacccaatggataccttgaaattttgaagacaatgctgttggatttattgaatctttccttaaagcatgtggccaatccatacttctactcctggcaagcaaatggttatatcattcttcatgatgaggcttttttttttttttttttttaaccctcaagacaggatcttgctctgtcacccaggctgtagtgcagcgccatgatcatagctcactgcaggttcaaacttctgggctcaagcgatcccccaactcagcctcccaagtagctgggactacaggcacacaccaccatgcctggctaattttgtttattttttatggagacagaggtctcactatgttgcccagattggtctcaaattcctgggctccagtgactgtcctgccttggcctcccaaagtgctgcagttacaggtgtgagccaccacgcccagccatgatcagccttttgatgtctccttttgtcaaaagaaaattgtccttgtgttggtataaagacatatgctacaggagcagcattctgaagacttcaatttcaactatggctctacttcttactagtgaaacccctggagaagcaacttaatgtctctgaacctgttatctatcatttgtgaaatgggagataaaacttgcctgaccctaaccccagcactttgggaggtggaggcgggcggatcacttgaggtcatatgttcgagaccagcctggccaacatggtgaaaccccgtctctattaaaaatatactaattagccgggtgtgatggtgggcgcctgtaatcccagctactcgagaggctgaggtagggagaatcgcttgaacctgggaggcaggggttgccatgagctgagatctcaccattgcactccaactggggcaacagagcgagactctgtggaaaaaaaaaaaacaaaaacttgcctgaccaaactcaaaggatgtccctgggaatcatgtaggattatgtatgtgaaagtacttggtcaactatgaataaaacactataaatatattgtcattgctacataaattagtgtcgttaaacaagtattttggaaactataatcattaattctgtaaacatttcttaatacctatgtttttcctgtttgttttttttttttttttttttggttttggtttttttttgagatggagtctcactctgttgccctggctggagtacagtggcatgatctcggctcactgcaacctctgcctcccaggttcaagcaactctcctgcctcagcctcccaagtagctgggattayaggcatctgccaccacgccccgctaatttttgtatttttagtagagacgggatttcgccatgttggccaggctgttctcaaactcctgacctcaagcgatatacccaccttgacctcccaaagtactgggattacaggcatgagccactgcacctggccagttcttaagttttagataggttttgataatggtggaacttagaatggataagacttgtgggccagaaacttgagcctatgatgactagttttcttttgagagaaagtctcactctcgcccaggcgggagtacagtggcccaatcccggcttactacaacctctgcttccaaggttcaagcaattctcgtgcctcagcctccccagtagttaggattataggagcccgacaccatgcccagctaatttttgtatttttagtacagatgggtttcaccatgttggccaggctggtctgaaactcctgacctcaggtaatccacccgccttggcctcccaaaatgctaggattacagatttaagccacggcacccagcctatgattagtttaatagatagcagggacaagggtaaactagccagaaggcatgaatctcaaaggaggaggcattttttttcccttagtggagagatgatgttggaagtgctaatgcggagctaagagaatgctgaagcctccactgagattagtggaatgcggaaaaatgagcaccatccactttgaaaaaagaatttgataagtgttgtccttcaggagacccaagatgtaattaaactagagagatgaagacagtattctgtgtagagctaaagaagagagaggccaagcgcggtggctcacgcctgtaatcccagcactttgggaggctgaggtgggtggatcacctgaggtcaggagttcaagaccagcctgaccaacatggagaaacccagtctctactaaaaatacaaaattagccaggcgtggtggtgcatgcctgtaatcccagctacttgggaggctgaggcaggagaatcacttgaacctgggaggcagacgttgcggtgagctgagattgcaccatcgcacgccagcctgggcaacaagagcaaaactccgtctcagaagaaaaaaaaaaaaaaaaaaaaaaccagtctggccaacatagtgaaaccccatctctactaaaactacaaaaaattggctgggcgtggtggctcacgcctgtaatcccagcactttggaaggccgaggcaggcggatcacgaggttaagggttcgagtccagcctggccaacatggtgaaaccccgtctctactaaaaatacaaagattagccgggcatggtggtgcacgcctgtaatcccagctgctcaggaggctgaggcaggagaatcgcttgaacctgggaggcagaggttgcagtgagctcatgttgcgccactgcattctagcctgggcaacagagcaagactgcatctgaaaaaaaaaaatatacacacacacacacacacacacacacacacacacacacacaattagccaggtgtggtggtgtgtgcctgtagtctcagctacttgggaggctgaggcaggagaattgcttgaacctgggaggtgggggtttcagtgagctgagatcctgccactgcattccagccccggcgacgatgcgagactctgccaagaaaacaacaaaaaaagagattgtgtgtagggtttgtgggatagattaaaacaaaatcttataataggaattctgaaggcctcaatgaaaaggatggagggagaacagcaagaaggaaattgtatgagggaaagaaatacagagaaaaatttagaagtatagatgtagagactgtattttggatagttgccaaggatggcaatgatgggaagcatgatgagattaactgaccttaggcatctgaatgatactttggagtcaagtyattcacttggcacagactgtacccccgttgaagtcagaggcctcatagggctaagagggcagtccttgcttagaattggggaacaggatcagttaattctcaggtttccttgcccagtggtagaaacagtaagaagatctctgtaccaccaccccctttttcccaattcctgatcagtctgtgttcttggtttctttttccaacttcctaaattaaaatgtttttcagtccttgtttttttagccaccatacattaaatgtgagtgaaaataccttgcgaatattattggttactatatagagatgcccttcatgtcaaaatttggataaaaggaagattttcaacagaacagtttggtcaaaatgaatgttaccaaatcaagatttttaggttttgaggagattttgtagctctcttttttgtttgattggtttatttttttgagatggagttttgttgtcacccaggctggagtgcagtggtgtgatctcggctcactgcaacctctgccccccaggttcaagcaattctcctgcctcagcctcctgagtagctgggattacaggtgtgcaccaccatgcccgggctaattttggggtttttagtagagacaaggtttcaccatgttggccaggctggtcttgacctcctgacctcaggtgatccacctgcctcgacctcccaaagtgttgggattacaggcgtgagccaccacgcccagccgattttgtagctctttaggttgttccaacaaatattattagccatttcagttgttgactatttatattgcatttatatacatttgttttctggtttttccctgtcgcaaatatagaaaagtaaggaaacatagtctgaaaattaggagaaaaaagtatatatggaggcaaaaaaaaaaactctggaaaagtagaaataggccttgcgcagtggctccacgcctgtaatcccagcactttgggaggccgaggcgggcagaacacgaggtcaggagatcgagaccatcctggcgaacactgtgaaaccccatctctactaaaaatacaaaaacattagctgggcgtggtggcaggtgcctgtagtcccagctactcgggaggctgaggcaggagaatggcatgaaccccggggggcggagcttgcagtgagcagagattgcgccactgcactccagcctgggcaacagagcgagactccgtctcaaaaaaaaaaagtagaaatagttggctgaagatgaattagaaataaaaaaagcaaaacctttaaaaagcctgaaaactatatggaaatgctttaaaatgctttaggagttgcaaaacaaagtagtagttgagaattaatttttttttttgagatagagtctctattgcccaggctagagttcagtggcacgatctcagctcactacaacctccaccccaccaggttcaagcgattcttgtgcctcagcctccaaagtagctgggactacaggcgcgacaccacacctggctaatttttgtgtttttagtagcgatggggtttcactatgttggccaggatggtcttgaactcctgaccacaagtgatctgcctgccttggcctcccaaagtgctgggactgcagacatgaaccaccgcacctggccagagaattagtttttgatgaaaaaaaaattttaactctctattgagcaacttattttaggccaaattctatttggacagttatcttttgccccgtcaggtctcctgctgaagctccgttctccacttgcaaaacaacactatacgtgccttttttctcttatttgctgataaattaaaatttattttatttttattttttatctttagacggagtcttgctctgtctcccaggctggaatgcactggcatgatctcggcccactgcaaccttcacctcttcggttcaagcgattctcctgcctcagcctcctgagtagctgggacaacaggcatgcggccaccatgcctggctaattttttgtgtttttagtagagacggggtttcaccatgttggccgggctggtcttgaattcctgacctcaagtgatccacctgcctcagcctcccaaagtgttgggattataggggtgagcctctgcgcccagccaaaacatattcatttgaaactgcctatttttattttcagtgttatggtaacattgattccctatagctttcatctacctctactcatgagtaggtgacgtttttctaccactcaacctgtacacattttaaaaaagctgtcccagctggttttgaaatgtagaagtgtgccttgagttgaaaaataagtaggaaagtacaggtctttagataactaactgtggcatggagtcagtttatactttctttttcaggtgaatacattatagttcttcagtgtgacttgaagtagagcattcacagtgtgcgtgaaaacatgcagtaccacttgtgtctggctgagggggaagtagggagtggtctcataggtggatttttaggaagttctatgttttgaacagaattcagcaattagtggaattatgttgttggttgttaggaagtatatatcatctaggccaggcacagtggctgacgcttgtaatcccaacacttagggaggccaaggcaggcggatcacctgaggttaggagtttgagaccagcctggccaacatggtgaaaccctatctctactaaaaatacaaagattagccgggtgtggtggcgggtgcctgtaatccgagctacttgggaggctgaggcaggaggatcgcttgaacccaggaggtggatgttgtagtgagccgagatctcgccactgcattccagcctgggagacaagaatgagactctgtctcaaaataaataaataaataggaaatattcatcatgtagaacacagctttttttttagagactgagtctcttttttttttttttttttttttttgagacggagtctcgctctgtcgcccaggctggagtgcagtggcgcgatctcggctcactgcaagctccgccttccgggttcacgccattctcctgcctcagcctcccgagtagctaggactacaggtgtgcaccaccacacccagctaatttttgtatttttagtagagacggggtttcaccgtgttgaccagggtggtcttaaaatcttgacctcatgatctgcccgtcttggccttccaaagtgctgggattacaggcgtgagccactgcatccagccagtacgtagcattttaaatagtgtttcttttcccaagtagagtgctaaaaaaaaaaaaaattctctgacctgatgaaaaaactgattctatcttgatctcagaaatttgtgtttattagtaagagatatttaaccttctcatttttgtaatgtcccaaaagtaacacttgatttatttagtaatcaattcattaaaaatgtttattttttaaacaattactctaccatgagggcaaatttggttatagcatatataatggtttgtttaatctttgattggtaaaaacattctttgaggcttttattttattagaatcttgacatgctatatttgggggtaaaatatactttaatgccttattctagatgagtaaaaagtaatggtaatacatgtttcttgtgaagggaaaataaacaaggtccagttttattttactagatagcaaataaaaaaaaaaagagggattagtgatttcagtcttttagaaatggttggcatctctctgccttagttcttacctcacttgtaaaggattgagttcttccttaatgttttctcctggtatgagaatgtggttatattctttcttaggtaattgataggaatctaacctagtttttttttttgtttttttttagttactttaagttgaaatgtaaaggagcagttggttctgtacatttccaagcttctctgtaataattgatcattacaatgatgaccctaaagcatcaggaaaatactgtatactatatgctcagagatatatatatgtatatatatatatatatttgatggagtctcactgtcgaccaggctggagtgcagtggtgtagtctaggctcactgcaacttctgcctccccgggtttaagtgattctcctgcgtcaccctcttgagtagctgggactacaggtgtgcaccaccacacccagctaatttttgtgtttttagtagagatggggtttcaccatgttggccaggctggtcttgaactcctgacttcaagtgatccactggccttggcctcccaagtctgggatttcaggtgtgagtcactgcacccggcctatttttctaaaaaaaaaaaaaaaaagaaaaaaaaatctggaaagagggagctgccttacatttcagtctatatttattagactcctaatgtacatttctctctcactttctttattttgaaaaacaaagtactattcagtaaagagcctgaaactgcttcagtccaagctgattttgaatgcataaagatttacttgttggattcagtaaaaaaggaataagaaaaacttactatatagtaatttttcctaggtatatgacctcaaaattgtgcttagatgccattgaaatagatgttcatgttttccattccactcaacaaatatcacttaaaaacagtacagttggtgatttcttacagaaatcataaatatgtactgcggagtgaaaaaaccaactacttaactatgatgaaatgggaacttttggttaaatttgtagggataggccaggtgcagtggctcatgcgtgtaatcccagaactttgggaagccaaggcgggcagatcacctgaggtcaggagttcgacaccagcctggccaacatggtgaaacccggtctctactaaaaatacaaaaataagctgggcatgatggcggatgcctgtaatcccagctactcgggaggctgaggcaggagaatcccttgaacccgggaggcgaaggttgcagtgagccgagttcacgccactgcattccagcctgggcgacagaacaagactccatctcaaaaaaaaaaaaaaaaaaaaaattacagggataaatttgcagtggtaacattttacacatatgcaaaaagtgctgtatctcaaacagtttaggtggaaatgagtatgatttgctttcagaatgtgtgttaggtgactcagaaagtgacttcaatgataaggaatgcactggtttcgaatatatgcataaagattttgaatgaaggtgttttgtgaaacgttaagtaaggtaggagaaaaatcagtattttgaaattatgatttattattttaagcctcctaaattaatttgcatttcagaagtaaacatctggtgtttggtctatatctctaaaagtgtatagtcaagttggtcagaaaacattgtttttatgttcttattagaaaggaacatggtaaatcaccttgtatttgggttttctttctagttaggcttatttggtattaaagtgttgtggggttttttttgagatggtgtctcgctgtgttgcccaggctggtctccaatttctggcctcaagtgatcctcctgccccagcctacgaagtagtcgtgattacagacatgcttcactactcccagcattaaattatatttattgtacttcatttaaggtaaagaatatctaatactataatacaatattttgagagttctgcctaaaaatgttttggcttaaacaaaaaagttttggttatcctgaaagaacttaattttgtgagacaactcatttctctaataattctcaacaaagaacatgttagtataaatagctttaaaagtggtataatttgcttactatttagaaaaacacttctacccaataaatgaagaagaaagaaaaatccctgctttacagtttttagtcttatctagatccaattattagtttttaagttaatgtatttttggtgacttatcttttattaattaaaaacatttgcagctgtccctttccccccaacacatcgcttgacatctgaagaagtatttgatttggatgggatacccagggttgatgttctgaagaaccacttggtgaaagaaggtcgagtagatgaagaaattgcgcttagaattatcaatgagggtgctgccatccttcggagagagaaaaccatgatagaagtagaagctccaatcacaggtaagcttattcatgttttgggtattatttttattatgtcattatttagttgcctggatttacaacttactgttttcaatgatactgtatgctaaatcaatattacttggacattatcttgaatttcaaattattttccatacttaaaaatgattgcctgttttcagtgaatagacatgattctaaataatctgagtgtagaagttagtctaatatgcttttgtgaaggtttcatcaattgtgttgaccatacttcaatttgatcaatacttactttgctttcaattgttagggtcaaataccttgatgtcatatcagataccaaaagtgaccatttagagagcaacagaaagtattgagttagaatggatattttaactgccaccattgtaattttgtcatcttgaaacttaaaacacatccttggagtcctagagacgatctttataaatgtagatttcagtttgtcactgaccacaaatttcgttatttctgttacatctttttctagatcttgagcacatgaacacttggttacacatcatcctaatcatgactgttcatagactacttccttctcagacatttcttgatagcatttgtactatgtcttatgtaaaatacgttttaacttaagtaaaatttgttgttttagagatttttttcccttatctaataatcttcttgtttcagtgtgtggtgacatccatggccaattttttgatctgatgaaactttttgaagtaggaggatcacctgctaatacacgatacctttttcttggcgattatgtggacagaggttattttagtatagaggtaataatcataaactgtcatttgatttgctgttaagtgttaacacagatgctttcacttaatcctagttttcacaagtacctgtgttaggtttttttaataactctgcatattctgaagtttttatgaaaagctactatttattcctgttctgtctttcaaacaattcaaataaatttctttgtataactctgtttatataattataattgccatttttttcccagtggaatttatgagctgactgaggggtctttattgccctgttaactagtggccttaaaaatttagtgctatttatctctcttgcccctaaaggcattaaaccatgtgaaaaaagattacttgaattctgtctgattaaataaagtatattgtgatttttttattgcttgagccctagtgcttctgtttctccttgtgtagctattaagactcaagtatatcctatggaatctttgtgtatttggaaagtattaatttgtttttaaaaacttgaggcattaaaatgaccttttgattatcacttaacagtagatggttccttttcttcctttttctcttttctttttctttttttttgagacagggtcttactctgtggcccatgctggagtacagtggcaccagcatggctcaatgtagccttgacctcttgagcttaagggatccttctgtcccagtctctcaaatagctgggaccacaggtacacaccaccatgcctagactaatttttaatttttttgtagcaatggagtttcctatgttgcccaggctggtcttgaactcctgggctcaagtgatcctcctgccttggactcccaaagtgttgagattacagatgtgagccacattgccctgccatctttttaaattatataaacaaaatgcagcaaatgtagaacaatatgtattttccaatatatacattttttctttttttaatgaaaaggggatcatattataatattgtctgtaacttgctttttcatacatgcctacaccaaatatccttccaagtcagtaaatataaactcgtagcatcattttaatatctacattgttttccatctaataaacaaaccataattaattaattccttgtgttagacactgaagatgttcccagtttttttctttacaaatgatgctttaatgagtcatattattcatacatctttacatacttgcctgattatttttgtaggacaaattcctagaggtagaattgtggggtcaaatttctaccaatagatacctgtgttgcacatttaatatgttctaagcatgttctaggcactgaagacatatcgattaatcctcacaataatattaatgaggtaagtactgttgttttattcattttatagatgaggaacctgaggcttagagaggttaagtaacttgcccaaggtattattagtaaacagcatagccaggcaatgtgactcccagcatatgcttttaaccaccttccctagtagatactgaaaccttacctggtgaatttatgttggttactgttgtttatatctccttctccagtgtttccaatatacctttttttctgaggtgtgctaggattctcagagtggaaggaagttctagactctgtctgtcctgcttcccttaggaattttgctattttgagttcttcttcctcctgctgatagttgattattagcctcgtcaacttttcccaaattgtcacagggcttcaggcaaatcagaaaatggcccattttaacaaaaaaatttcaggcatttgaccaaaacaataaaataaacagttttatgaagcttatttggtaactaagttggtgtgcatgtccttgtgtaagattgttttgcagctgactctttttttttttttttttaattgagatggactctcactctgtcgcccaggctggagtgtagtggcgtgatctcggctcactgcaacctctgcctcccaggttcaagagattctcctgcctcagcctcccaagtagttgggattacaggtgcccaccaccactcccggctagtttttgtatttttaatagagatggagtttcgccatgttggtcaagctgatctcgaactcctggcctcaggtgatctgcctgcctcggcctcccgaagtgctgggattacaggcgtgagccactgcgcctggatgtagctgactcctttaatacattttgttgttataaaaggaaaataacaaagaatcaaaataagcatcgagaacagattatttccctgattttattacttttttcccttttgaataaaatgaaggatatgaatagttacatgtttagatataccttaatttattaacaataaagttttgttgggtgtggtggctcacacctgtaatcgcagcacaggttggccaagtcaggcagattgcttgaacctgggagttcgagaccagccagggaaacatggtgaaaccctgtctccacaaaaaaaaaaaaaaaaacttagctgggcctggtggcatgtgcctgtagtcccagctgctcaagagactgaggtaggaggatttcttgagcccagaaggtcgaggctgcagtgagcagtaattgtgccattgcactccaacctgggtgacagtgagaccttgtctctaaaaataaaaaagtttgttttttctttttgcatatgattatataaaccatgcttatttccatatcaaatatttcttccttttttaagcaaataagtaaaatgtgagtctctttcttatgttaaatctatttagagaatagcatctgctataatgtttaataatatttttatttgaaaaattacatttgcattgaattagttcagataataagcacttaccatatgtaaggcaatattcataatcaatgaaacaaacataaaacatggaccttcccttcatgggcagcatggcataatgcttaagatcagaggatcagaatcctatctccatcacttagaagttttgtggttttggacaagttacttgagatctttgcttcagtttctcatttgtaaaataaagatgatattacatacttcatagtgttgtttgaggaataaattaggggaattatatagtgcttcacatattgtaagtacttaataaatgttagctgctgttattttgacagtattatttactaatacgcatctgtagaccagtgtgctaattgtttttatattgggcagtctgtaaatccaaagtaattaaatagattgtttgactcattcattcaacaaatatttattgctcttctcctatttgctaggtactcttctgggagtggagaatcaaaagtgaataagatgacaaaatctgtgattttgtggtgcttatattttagtaagggacaaagaaagataatagaggatggtaagggtagtagaggaaaaggagcaaagatcaagcagcttcattaaacaaaartacaagataaattcactagaaaaattttcttttgcagtgtgtcttatatttatgggttctgaagattctatacccaagcacattatttcttctgagaggcaaccatgaatgcagacaccttactgaatattttacctttaagcaggaatgtgagtactgccagaagaaatgttttcacttcctcagtattcttttggacttaagtgggtagtaagagttttgaagactttacagtgcaacatgtaaggacagatttcatgtccacacataaagctttgaggaaagttgtcgagcactctctggtgtttaatggtattaagaagtttttggtggggcatggtggttcacgcctgtaatcccagcactttgggaggcccaggcagggggattgcctgagctcaggagttggagaccagcctggccaacatggtgaaaccccatctccaccaaaaatacaaaaaaaaaaaattagctgggtgtggcggcacactcttgtagtcccagctgctcaggaggctgaggtgggaggatcgcttgagcctgggaatcggaggtcatagtgagctgagatcatgccactgcacggacaattgcctgggcaatagagtcagaccctgtctcaaaaaaaaaaattttttttcatttcagaatttcttattatgtttaacttttacaaacatacttagagttttatatataagttttaatgttacaattaatttttctaagccaggcacggtagctcacgcttgtaatcccagcactttgggaggccgaggcgggtggatcacctgaggtcaggagttcaagaccagcctggccaacacggcaaaaccccatctcctaaaaatacaaaaattagccaggcgtggtgacatgtgcctgtaatcccaggtactcaggaggctgaggcaggagaatcacttgaacctgggaggcggaggttgcagtgagccgagatcgcgccattgtactccagcctgggcaacaagagcgaaactctgtctcaggaaaaaaaaatgtatatattttttctaacaggaaaaaataaaaaccaaaagaaaaaaatgttattttgcattggagatttttgtccttcaatcttgaggcattcctgtgaggaatcctaacaaattgtttatcctgttaccattgcagatcatttcaatcatgctattaatgattgaaattcttcttaaaatttttttgtttttttaaatatcattgttttaagactagtcaggtacagttggtgaaattcttaacctgcaatgtttatcccttttctctctcaaattattatagcaatggtaatctaatacctgtaagtaaccatatgttacagaacaagattaggcctttttcacacctcaaacctttgtgcttttttattatttttgttatttttattttttttttgagacagtctcgctctgtcgccctggctggagtgcagtggtacaatctcggctcacagcaacctcctcccgggttcaagtattctcctgccttagcctcccaagtagctgaaattacaggcatgcgccaccacgtcctgctaatttttgtatttttggtagaggcggtgtttcaccatgttggccaggctggtctcttaactcctgacctcaagtaatccacctgcctcgtcctcccaaagtgctgggattacaggtgtgaaccaccgcatctggcctgcctttgtgctttttaagttaatatttatgactgtattaagtagagttaaattctaaaagcagaaataatttcaacgttttgagactcaaaacatgatccaataaaggtcatactaagtagagacttgcagcaacaggagaaaaatacagtgatgggtagtggcagaagtggcatactcttataacttcaaggatcaggcagttaacctaaatgagtaagataagacctggaaagtgcatgcttgacctaaaagcagtcaaattagaatttttattaaaccacagtgctagaaaacagagtcgttagcagactgccagtgtagaatctctggttgctggatatatatatagtttttttaatatttgaatattacagtattaaaacaggaaataggaactaagttctttttctttgcctagataaataacaaaccacctaccaaaatctcatcaaaaccaaaataggaatttaaagttgtaaaggagcaaatgaaagtgcatgatatctctctaaaagtaaatgatagtttgatttggtagagttttgtctttcttgtgtttctatattggcttcctgcttcactgcccattttaaagtattcattgtaggcaagaggaacccctcagcttttctgacatgagcatgctattatcttttatttttcagaaaaaatggatgaaccttgaattttgttgtgatgatgtagtcatcttgcctgtaataagaataaagtagtcattgactcttagaataaaataaagcaagtattaaaatgattttaacctcaagtacagttctaattttgccttatttggccgataaaggtgaagggttgagctgtttttaagagatttctttcttttttttttttttttgagacagagtcttgctctgtcgcccaggctggagtgcaagtggcacgatctcggcccactgcagcctccacctcctgggttcaagtgattcttgttcctcacccattgagtctctgggattacaggtgcacaccagcatgcctggctaatttttgtatttttagtagagacagtgttctgccatgttggccagactggtctcaaactcctggcctcaagcgatctgcctgctttggcctgtcaaagtgctgggattacaggcgtgagccaccgtgcctggcctgtttttagagatttgactgacttatttttaacaatacgtgatgacttttctgtcatccaaaataattttagagagcaaatattttgcttcataagacataacatcatcgagaataattttagagagagcaaatattttgtcttcataagacagataactttgcatatttttgttgattcttataggggaagatgctttccttaaaaaaattgtgtgcagtaagatttattctctgtggtatttacttctgtgacttttgacactgcatagagttgcccactaccactatcatgatacagaaaagttttatcatgccataagttctctcttgctacctttttatagtcaccccttcactcactctgaagccctggccaccactttgctgtttactgtctataattttcttgccatctgtctgtctgtctgtctgggctattactacagttgaaactgtaactatctcaatttcattataaatagctataagatataaaggaggggagagaacaagaaataaaaatctaatatatatgtttttaaaatggtcacaccaccaccagtaatgtaattttcaattagttttttgtttttctaggtaaaattaagtattcggaaagagtctatgaagcttgtatggaagcttttgatagtttgcctcttgctgcacttttaaaccaacagtttctttgtgttcatggtggactttcaccagaaatacacacactggatgatattaggagagtaagtatatattttacttccgagattgatttctatttatagtacattgttgagtagagcagaagtttcaaacttcacttcactgccaagattaggtaatagtaaaaattagtatactgatatcttaaggaaataacttctgtttattcacaataatatagtatgaactgtattcaaagttggtatcgttttcctatgcacattttatccttactttttgatgagttacttctgttctttcttttctttctttcacagttagatagattcaaagagccacctgcatttggaccaatgtgtgacttgttatggtccgatccttctgaagattttggaaatgaaaaatcacaggaacattttagtcacaatacagttcgaggatgttcttatttttataagtaaggaaaaatatccaagattaatcacattttagttgttaacatagcatatgcttcatacagaaaagccattattttacttaatttactctttttcccccacagctatccagcagtgtgtgaatttttgcaaaacaataatttgttatcgattattagagctcatgaagctcaagatgcagggtaagaattstgtttccctgacccaaattaacacctaaaatataaatcaaacttagtaaccatgattgatgctttacgatgcatattaagctatttgttttgcagctatagaatgtacagaaaaagtcaaactacagggttcccttcattaataacaattttttcggcacctaattacttagatgtctacaataataaaggtaagatattgttgataaaaaaaattgttaaacaacttagtattttaattgactttttttaatataataaaaaaggggtgttgtttgaaactattagtatccagatttctttataaataactgtaagatggaggggagagaacaataaataaaaatccaaaatgtgaaactaagtaatatgtaaccccattccacaacttgtctcttggaaaagccattttgtaaaacgtgctctgagttaagtgcatcaagcaaaaccaaacatgattttctcaaactcccctttcttaaatcttttcccttattgaggatgttttcttatttgtataaagctgctgctgctttgatgattttatttgcactgtctacttgtttagtttatcatgtttcttgttttatgttcactgatctaggttctctttccctttcttatttccttcttttacctccacagtcttatcactgccccatgaagatttgtatttgagcttttttttaattaattcagtttcatctcatttgagggatacattcttctctttatttttactgcttttttcctttgccttccgttccagagattttcatttccccaccttccctgaaaatttgacctgtctatagtaattggatttcattttattttgaatacagtttattgacagaaagtgccaaagggtcttaatctagttaagtgtgtgccaaggacattgaagatgagattgggtatgtttatgtagtttacatctttggaagatgatattaagaggccagcttctcttctgtcttgacatgtctggaattcagttgactatgccatagcttcaggatcagactggagtggatgtgccaagaggaaagaacagaaggttaaagactttaaaaaggacatttagagagagaatgaggtcattgctaaataagggtcatggtgtaagttcaaaagaggaacagaggaagtttttttggatgatgagaggtgatggttaaaagattaaaacacttgcctgagaccaaacagtagcatgctggataacttgggtacagaatatgctacaagaacttacactatagatatcttatgaaatatgacttcatttttgagaagaaacatatctaagttttgattccattctttctctctctagacagggtctcgctctgttgcccaggctggaatgcagtggtgcagtctcggccgactgctacatctgcatcctgggttcaagcaattctcttgcctcagccctccctaatagctgggatcataggcacccgccacctcgcccagctaatttttatatttttatagaatgaggtttcaccatgttcaccaggcttgtcttgaactcctgacttcaagtgatctgcctgcctcagcctcccaaagtgctgcgattataggcctgagccactgcgcccctgccctgattccattctcaaaaacagaaccaagtgttaaatttaactttctaccagtgctctaattcctcaactgtgacttcctcttgttaatattaagggagctagtgttcagtgtccagttgagtactgccttactgattgtcctttgttggtttgactcaggaggttaagggatggattttttttagcacttagaaaagaggctcaaaccattgactgtcttatcaaaaatcagatgtctctttgtagtcctgagtctgtacataaatagtgttaatggtttgagtgtttacgttgtatgggtatgtttgtaatttttcattctatccataaggcaattttctagatttttctctcttttatcccttacaaaagatctgaaagcttggtatcagctcataatttttgagactaatttaaaatactcttttttcccactttgaactgattgtcaaaacatataatttaaaatacttttatttcagatgggaatttcatatgggaaacaaacatatacttattaagttagtaaacagtaacatgtagcaggattacttttgattctctattagccacaatcacaaatgttggaatttaacatctgcatttcagtgcttttcattaaaatgaaaaaaaagtaaccataaaattatatctacaagacattttatacttttatgtattttcatgtgaaatgcattgtctgatcttaaacttctgtggtaggcagggtagacatattagtcctgttttataaatgagaaacacattagttgaataatttaccaagcattgcacagctagtatgtgctatagtttagatgagaatccagcccttctaacccagtgttctatacagtaatataaccagtaactgaaatctatgtaggtcatttaagattttaattatatcaacatattgaaacattagatacctgcatttgagatgaaaatgttatctctggattgtttggttataatattctcttttggtgttttagtaggattttttttctaaacaaagtaaaatatttctttgtagtaattttgtctgattttccatattaaatgaaacaaatacattcatacatttataagtaaaatgttccaaatgggtgggatttttttgtttgctttattaccattcagctatccttttcaggttgcctgaagctagaaagatcttaaattctcaatttgtttgaactttaaaaacctagaaaattgctcattgccattctgtgtttcctctaaaaactgagttttcacaattttggatttagtaaaaatgtatgttcatcattggattataaagtaaaacaaacattctggaaagaatctggaaatttcattagtaatgtgaagacctgactatagttatagttctacataacagtgttaaaaacaaaacctatgttattattaaaaattagttccttcctccctctaccagccctgattccactcacccccgatctcccttcctcttaatatttttctgcttttatgtattttatatttttaaggctaatgacaaatagttacttatctattaagttattgatgttcaacttatcttgcagctgctgtattaaagtatgaaaataatgtgatgaatattcgacagtttaactgttctccacatccttactggttgcctaattttatggatgtcttcacgtggtctttaccgtttgttggagaaaaaggtataatttttatttttaaaaaaaatttgttttattactgttacatttactccagtttactatcataggcacatacttgctaaaggaaaccaaagtctagtttcactgtggttacagctctccttgtgtcagtgggtgtggacataagagtctcaaagatattttagttagctgtttacagcccccatgtgaggctgtctgggggactgggagaagatttataaatagcccaatgtcttcagctgttggattttctttttttttttttytttagcttaaatcttttatgaaggggtggagagattgctttgcttgaaatgggcccttctgcatatcttaacaccatttttgggcattccaccgaaattcttggggaaatttagtagccttcattttagcaatattagtcattttaatagctgttctatactttaagagaaatcataaagagaaattcagattgtaacccaatattccttctcttatataaaaaatatgtataaaattttagtagtgatgcctttctaatttagaggaacacttgttagtacataataggctttttgagagaaaataaatgctatttaagaaattctgtttctgtgtttcatttgtagttctatagaattcttaggattttgttacctatcatgttcttttccattttaagttaatttttttcataagaaaatgcctcagtttccatatgtggaaaatgacattatgagagtacagacatgattataaaacattttgttcagtatccccctctattttttctcacctcttccatattacaaaatgttcctttctgtatgagatacgtcacttctgccaaggcaatttgtagttctgaaattcagaattaatacttaaactgtgtatgttaaacaggttttctgcagattgcatttggtgttcttcatttactcagtaggtccaatgttaatacggagatagaattaccctttagcatttgagaagggggccagttaagggcttaggtgcaagggatgcattacacttacaaccttctatctttggtgtatgagaaatagttcaatcatagcatcatcagatgaattaaataattcatcctgctcactctcctgccttcaggctagactgcaactcaactgttttaatgtaatatgggaaggatggaggggccaggaagataaggtaggaggaaaatggacatttcatagattctaatttgattctctgatagtcccacataaggaaatatttcgttatatctaatctaaatatttatgctatgagtatttaaacaaggaaagaaatagagataataggtttttctcaactaatgcacctgtcaaaaaccagggcatcatagggttttagagctcataagtggatataacagtcatttagcccaactccttttgagagatgagataatttaagatgaattctgtggatcccttacaagtgaagatggagaacagtaggcttttatcagtattcctgtatttgaggtctggtactaagtgatctttagtttttccattgccactctaaatcatcttttataaacaaagaaatattcaaactttttgaccatttttgttgtttttctttagatcttctctaaattattcacatctctctaaaaatgtaaagctcagattttaacattacatgcaaatagaattctagccagtgttgagcacagtaagaaaatcttctcaaactctttgcatattttgctattttaatacatgatggctgtttagatagcctgactacttcttgatggtaatgagcattttcttttggtgtgaaaagcagcaagtgacatttgttttacttcgaagaagccagctggactctgggtctagttcctgagaagcaggaactaacctaagccagaggcttcctgaaaggctgatttaatcccaaaattaggcgaaagcagtgtttccttacccttttgggagctaaaacccccactatttttttttatagagacagagtctcgctctgtcacacagactagagtgcagtggtgccatcatagcccacagcagccttgaactcctgggcttatgtaatcctcctgccttgggcttgtaaagcactgagattataggtgtgagccactgcacctagccaagaaccccttttctgtttcactaaaaatattcctacattggcctgtagtcccagctgctagggaggctaaggcaggaggatcacttgagcccaggagtttgagaatacactgtacaacaatcaaacatctgaatagccactgcaccccagcctagacaatatagcaaaaccctgtctctaaagaagtaaaataacttacattgggaaattttcaacatacaccaaggtagagtgaataatatgaatttcctatataccaattattcatcttcaacaattatcaaatcatagccaatcttgtatcatttatgtccccatccagtactccccacctcatacctcaattattttgaaacaaatctcaactcttttctatctataaatactttagaatatatttctaaaagataaagagtcacattttaaaagtacaaataaaaacatttattaattttttttttttttttgaggcacagtctcattcagttgcccaggctggaatgcagtctcattctattgcccaggcacaatctcagctcactgcaacgtccatcccccgggtttaagtgattctcatgcctcagcctcctgagtagtgggattacaggcatgctgtaccacacctggctaatttttgtatatttagtagagacggggtttcaccatgttggccaggctggtctcaaactcctggcctcaagggctctgtttgcctcaacttcctaaagtgctgggattacaggtgtgagccactgccaaaaacgtttattaatttcttaatatagaatccctttgagaatctgataaaagttatggacttttgcttcagaaaaattcatgtataaatgtatgtactcacaacattttcaggatggtcatagttctgaaatgaatttgcaaccttcacacttattggccctcctttaagaacctctgttctagaggatctaatattatatgatcttccatagaaggtcatacatgtaagatttatttattgactagattttttttaagtgttttattcaaggtaccaaggaaatacagatacaagtaagatgggtctttgcagattaatgtgggacctgtgatatatataaataatgataataagatgtaatatggtaagtgctccaagacaagcgtagttttataggaattgagatggctgggcgtggtggcttggggccaggcgtggtggctcatgcctgtaatcccagcactttgggaggctgaggtgggtggatcatcaggttaggagttcaagacccacctggccacgatggtgaaaccctgtctccactaaaaatacaaaaattagctgggtgtggtggcgggcgcctgtaatcccagctactcgggaggctcaggcagagaattgcttgaacccaggaggtggaggttgcagtgagctgagattgcaccactgcactccagcctgggcaacagagcgagactctgtctcaaaaaaagaggagaggccgggcgcagtggcttacgcctgtaatctcagcactttgggaggccgaggcaggcagatcgcgaggtcaggagatcgagaccatcctggctaacgcagtgaaaccctgtctctactaaaaatacaaaaaattacaggtggcgggcacctgtaatcccagctactcaggaggctgaggcaggagaatggcgtgaacccaggaggcagagcttgcagtgagccaagatcgagccactgcactccagcctgggtgacagagtgagactccgtctcaaaagagaaaggaggttatttctgtcagagggattaaagtagcttttgaacaggggcttgaagaatggtggaattgtgctggtggatatgagcaacagaattctagataagagaacttcctgagcctgagtctgaaagcaagaaatcataggtctctttgagggtttaatttgattagtgagtaggatctatgaaggacagtagtagaaaaagaatgaaaagttaggttagggctagatcatgaggatattgatcaccacacagagaagttggaactttgataaatggtgagcaagccattgagatggaatttgactgtggtcgtcatttagaaaaattactgtggtgaagtagactggaaggaagacttgacgttgagagacctgttatgaagttacaccagaagtcaggtagagacataatgaaggcctggtagcattaggaacggagagtggggagaaccaaaagaatggtagaagtagaatcagtgagacttaacaagattacatatttaagggtagggaatggttggagatgacttggatattttgagtctggtgaagatagtgccattaacacactccaatgagaaaactcttgttacaacaaccctttactcaggttactgctgttcttcatgttcattggaatctctaggcctttcagtatgtcattttcttccttttttttttttttttttttttttttttgagacagagtcttgctctgtcacccaggctggagtgcagtggtgtgatctcagctcactgcaatctccatttcccaggttcaagcagttctcatgcttctgcctcccaagtctctgggattacaggtgcatgtcaccacacctagctaatttttgtgtttgtcgcagagacagggtttcgccatgttggccaggctgctcttgaacccctgacctcaagtgatccgcccacctcaacctcccaaagtgctgggattacaggtgtgagccactgtacccagcctaactaagtcattttcttactagtcaaatccctttttacctctcttccttattaacataccctcaaactcctttcttttctgtttttctacttcatttgtcctataaatcttaggtctagtcaaatccagccatccattttctccattcctacagccacagtacagagtgctgctggagatttttacggacttgtgaattggcaccaccccttgatttataacattagctgagctcccagtaggaccctcataccgtttatatccctagtctgcttttttctcccattttgcttaggatagagtccaaattttccttttttaaaaaattgtataaagaaaagagggccaggcacagtggcacatgcctgtaatcccagcactttgggaggctaaggtgaaaggattgcttgagcctaggagttcaaggctgcaggctgcagttagctgatcactccactctactgcactccaacctgggtgatagaatgggactctatctgaaaaaaaaaaaaaaaaaaaaaaaaaagaaggagtttaattggctcgtggttctgcaggctgtacaagcatagcacctgcatctcctcggcttttggggaggcctcagggaacttctcatggtggaaggtaaagtgggagcaggcacttcacgtggtgagagcaggagcaagagagcgagggggaagatgccagatacttaaaaaacagccaaatttcacaagaatttactcactatcgtgaggacagcaccaaagggatggtgctaaactattcatgagaaatccacccccatgatccagtcacctttcaccaggctccacctccaacactggggattacaattcaacatgagatttataggtgacaacatccaaactatatcattctgcccatggtccctataatatcatgtccttctgatatatcaaaatataatcatctcctgccaatggttccccaaagtcttaactcattctagaatttaaccgaaaagtgccaactccaaagtctcatctgagactcaagcctagttccttctacctatgaacctgtaaaatcaaagacaaattatttccaagacctaatgaggatataggcattggataaaataaacattcctgctccaaaagggagaaatctgctaaaagaaaaggggttcagacactatgcaagtctgaaacccagcaggcagtcattaaattttttttttttctttttgagacagaatcttgctctgttgcgcccaggctggaatgcagtggtgtgttctttgctcactgcaccctccgcctcctgggttaaagtgattaccctgcctcagacccccaaatagctgggactacaggcatgccccaccatgcctggctaatttttgtatttttagtagagacagggtttcactatgttggccaggttggttttgaacacctgagctcaagtgatccatgcacctcgacctcccaaagtgctgggattaaggtgtgagccatcacgccagtcattaaatcttaaagctccaaaataatcattgactccatgtcctacatcctgggcacactgtttcgatgagtgggcagttctgtccctgtggtttttccacactgaggttgcaagctgccggtggctctgccattctggagggcagcagccctttctcacagccccactaggcagtgcctcagtggggagtctgtgtggggcctccagccctgcattttcccttggcactgccctagtagtgtctctctgtgagggctctgcccctgggcacctaggctttctcatacaccttctgaaatctaagtggaaaccaccaagcttcattcactcttacacttgcctaggggtttaacaccaggtggtggctggtgctggagcagtccctggctgtggggagcagtgtcctgaggctgttctggtcaatgggctcctccctgacccccaaaactattctttcctcctaggcctctaggcctatgatgggatgggctgcttccttttttccattgtcttggctattagcacttggttcctttcatatttttttcttaaacattttcttctatccatttccctcactagtgaaaacacattagtagttggagtgttctctacttactgttttcttcctttatacagtacccttatcttgaattcttcccttgttgaagaggtgacccttccattcaagccagtctaacttgtctctagattctattacctttctgctttttcaggaaacttgctttatcgtttatgtcctctatatcttcacattctcagtactagttcttttataaattattcaaatctatctgatctttaaataaataacatttctctcatctgatgtcattttctaactactgtgctgtgactttttttttttttttttttttttgctattactttcttgcctttctttcagaagccaagtttctggatgaaaatgtatactttaaagctacgatttaatatccgttaaatggctccatgtagctttcgagataaaccttaacctgtcaacacaaagtccttggaccttccctactttctcttcagcctcatttcctgcctttctctttcacgttatcttcgttctagccataacacagcaaagccagttttctgaacgtgttatgctctttaagttttataccctcatacttttctttattttttataactgctttattgacatgtaattcacataccataaagttgacctatttaaattgtacaattccatgttttttatatactacagagttgtgcaatcattaccacagttttggaacattttcatcatcccctccaaagaaaccctgtgcccattagcagtcactcttcattttcccctaaccccccttgctaaccctaggtaaccaccaatctgctgtccccatagattcacctattctggacagttcatataaatggaatcacacagtgtgtgctcttttgtgactggattctttccatggtctcaaggtttatctgtggtgtagcatgaagcagtacaacattcctttttatgatggaatagtagtctattgtatggatatagcacattttgtttgttttattcatcagctgatagacatttatttctactcttggacttactaataatgctgcgaagaatatgcatgtgcaagttttatgttttcattttctttttgagacagaatcttgctctgtcgcccaggctggagcgcagtggcgcgatcttggctcactgcaagctccgtctcctgggttcacgccattctcctgcctcagcctcctgagtagctgggactacaggtgcccgccaccatgcccagctaatttttatatttttagtagagacagggtttcactgtgtagccaggatgatctcaatctcctgacctcctgatccacccgcctcggcctcccaaagtgctgggattacaggcgtgagccaccatgcccggcctatgttttcattttcttgagtatagacctgggagtgaaattgctgggtcatattgtaactctatgattaaccttttaaggatctgccaaactgttttccaaaacagctgtaccattttattgttgttgttgtttttgagacagagttttgctcttgttgcccatgctagggtgcaatggtgcgatctcggctcaccgcaacctctgcctcctgggttcaagtgattctcctgcctcagcctcctgagtagctgggattacaggcacgcaccaccacgcccggctaattttgtattttttagtagtgacggggtttctccatgttggtcaggctggtctcaaactcttgacctcaggtgattgtcccacttcatcctcccaaagtgctgggattacaggcatgagccactgcgcccggccttagctgtaccattttacagtttcatcagcagtgtatatattctttggatgaaaaaatatatatattttaataaatatacattttaatatataaacatatactttacatatgtaaaatatattttaatatagaaaatacatgtatattttaatatagagacagggtttcgccatgttgcccaggctggtaactcctgagctcaagcagtctacccgctttggcctcccagggtgmtagggtgacaggcatgagctaccacacccagccgaggatgaatatattttcaaatcctttgcttattttataattgggttatttgtcttaaaattttctttattaaaaaatttttttgccaggtgcggtggctcacacctgtaatcccagcattttgggaggccggggcgggtggattacctgaggtcaggaattcaagaccagcctggccaacatggtgaaaccctgtctctactaaaaatacaaaaattagctgagtgtggtggtgcgtgcctgtaatcccagctactcaggaggctgaagcaggagaattgcttgaacctgggagacagaggttgcaatgagccaagatcacaccactgcactccagcctggacaacagagtgagactccgtctctaaaaaataaaacaaaacatttttttgttgtctatataaatttatgaagtataagtgtaattttgttacatagatatattgcatagtggtgaagtcaaggcttttagtgtatctatcaccagactagcatacattgtacttattaagtaatttcatcttccacacctctcccacctctctacccttccaagtctcctttgtctatcattccacactctacctccatgtacatatattatttagcttccacttatgagaacatgcagtatttttctgtctcagttgtttcatgggagataattattgagttgtgttttttagatattctatatgcaagtcccttacgtatatgatttacaaataattttctcccattccactttcactttctttctttctttctttttttttttttttgagacagggtcttgctgtgtcacccagactggagtgcagtggtaccatcttggctcactgcaacctccacctcccagattcaagcgattctcctgcttcaccctcccaagtagctgggattacaggcatgtgccaccatgcccggctaatttttgtatttttagtagagacagggtttcaccatgttggtaaggctgatctcaaacttctggtctcaagtgatccacctgctcagcctcctgaaatgctgggattacaggcatgacccccggcctagctgactttcactttcttgataatgtcctttaggctttcactccatcatctaggctagaatgttggagtgcaatcgtaactcactgcaatctcaaactcctggactcaggcagtcttaccgcatggccttccaagtaggtaggactacaggcatgtcctaccatgactagcttttttttttttttttttttttttttttttcttttttagagatgggatctttgtgttgcctaggctggtctcacacaaattactaggctcaagtgatcctccttcttcattctcccaggtagctgggattacaggcacatgcttccatgcctgattttttttgtcctttgaagcacaaaagttttctaattttttaaaaaaatacattttattgtgtatatttaaggtatacatcgtaacagctttattgaaatatatatactatgcaattcatctatttaaagcatacaattcagttggttttagtatatttctagagttgtgtaaccatcagaaagactaatctttctgtctctatagatttgcctttgctagacattttatataaataaggtcatatggtatatggtattttgtgactggcttctttcaaaaagttttttaattttggtgaagtcatatttatctgttttttcctttgttgcttgtgtttttgttgttatacctaagaaatcattgcctaatccaagctcataaagatttgcccgtttttttctgagagttttagttcttacattaggtgtttgatccattttgaattaatttttgcatgtgatgtgcagtagggggagtgcagtttattctttcgcatgtgaccatttgcagctttattcttttgtagttgaccattgttgaaatgactgttctttagccactgaattgttttggcacccttgtcaaaaatcaattgaccttaaatatcaggttttctttctggactctctgttctgttgtgataaatgactactacatcacttttttaacttctgtttagaatgccttatctgccctctccacttggcaaactcctagttcatgattcctctcaaatgttatctagcaaaagccttgccttccccagcaggtcttccccagcaggtcttttgcatatctttgaacacttacagcatgttttccatcaaccttttgcagttgatatttaatgtctccttcagtagttagtaagcttgttgaaggtagagactgtgcctttcatatctgaatcctagagctttaatgtagtacttgacatgtggggtgcttttagtatatttattagcaggaaaaagtggtttgtagaagtattgaattttgttttggatatgttcatttctaggtgccttcaggacatctaggtgctaatattcaatagacatttttatttattaattgaaatttgcttttatctttcttattttgtgtacttatttgttagatatttattgagtacctgtcatgtgccagggcacagtgccaggctctgaagttataatagtgaattaaacaacatcctacactcatgaagttttcattctagtaggggaaacatacagtatacaaatggtttaagacagttgacaggctgggcgcggtggctcacgcctgtaatcccagcactttgggaggccaaggtgggcggatcacgaggtcaggagatcgagaccatcctggctaacacggtgaaaccccatctctactaaaaaaatacaaaaaattagccgggcgaggtggcgggcacctgtagtcccagctactcaaaaggctgaggcaggagaatggcgtgaacccgggaggcggagcctgcagtgagccgagatcgcgccactgcactccaacctgggcgacagcgagactccatctcaaaaaaaaagacagttgacaataaaactagccaaggacatctagagcctgaaggagaggtcaacactggagatacagactttggagtcatcttcaacgaggtgataattgaaactgtaaatatgataatagacagaaattccaagtgattgaacatataggaggaataataatgcagagagaatcttgaggatatccaaagttttggggaaaaatgatccaaatgtgggaaaaccagaagagcagaatcttgggaaccaagggaaaagagaaggaaaaaaatatacagaatagtcaaagaggattaagcctatgaaagagccaagggttcagattgttagatagtcattagtaatctttagaagtaaatttcaagagagttgctgagccagtttttaaaagattaaggccaggcgcagtggcctacgcctgtaatcccagcactttgggaggccaaggcgggtggatcatgaggttaggagttcgagaccagcctgaccaacatggtgaaaccccatctctactaaaagaaaaaaaaaaaatacaaaaattagctgggcatgacgatgggtgtctgtaatcccagctccttgggaggctgaggcaggagaatctcttgaacctgggaggcagaggttgcagtgagccgagatcacgccactgcactgcagcctgggcaacagagcaagactccatctccaaaaaaaaaaaaagattaaatcctgagactttttggaaccactaaaactctgccatgattttttttcttattatgctatatccatgaatgaagatttgaaatgtatacattcagttgttattcatctctgttcttatctctatggggcttcatttttttttttttttgagaggcctgaaaatttgttccataaagaatctctttctctcagagttgttatccactgaatttctttcattttgaaagcctttgcatttttaaattccatcgatcttggtataagaatgtgtttgctttcttgggctaaacattatttgaccatttgtaaaaatagttgctatgtgtatgtatagacagttatatatggtcagctaacatgtaacttttttttcccaaatagtgacagaaatgttggtaaatgttctgagtatttgctctgatgatgaactaatgactgaaggtgaagaccagtttgatggtatgattattcatcttactatttttttttttactgtgaaatggtatttctttactgcctagcctcagtacacactattttgcaaaaaatagtcattgctttcagagactatgctatttgataagtaacaagttactttttttggatattaagatttgaaaataatttcagtgatttcatttttttattgtaatatggggaagaagatgaactttgggaaaggagaaatttggaagaaagaagataaggaaaggaaaattgaagtgttaaaaggatgtagttcttggcaaatatggacactggttagagaaaagaggataaaaatactatttgttttattagaacaatattcttagtgcatcagaagcatacctgaactcccaattttgcttttcctgccttttagacactaaaatagactgcttctaaattagtgtgattgtgttctaaaagaccacttgctaatttagtttcagattctgaaagcatttttttccacagaaacaaagttatacatggttgttgttacgtaagccaacaagcctatgtacctaatgcatgtttatagtaaaaagtaatactatagaaacaattcattttattttgttttgaaatttttatttaaaactttattatttaaatgtttaattaaaacctgagtacataaaaaggtaaacaatatataaactgaaaacgattcccttccatattcccctcatatctttgttgtagtatactttttatagttgtaatcaatatttcaatgtttccgtgtattaaacatggtctgtatattggtaagatttaatagctacgtatttctaagtccattgataaactataatgtttggctagatgtggtggctcacgcctgtaatcccaccactttgggaggccaaggcaggaggatcccttgagcccaggagttggagaccagcctgggcaatatggaaagatttccttgtctgtattaaaaaaatatatatatacacacacacacacacgaaaatttaattttcataatctcattgtttggcaactgggttctaaattatccttatgaatagcagtaaaataaacatatttgtataatagcttttattttcctccttggaataaatttattggagagaattatagagttacagaattaactctgtaattcttttagcttcatcgttttagctgtgaactaccagattgctttgcagaaggattggaccactatgaagtgcctccagcaaggaatccataaacatatttctccacaggactacctcattggattttggtcatttttacttattttcttcatggctatatagtagtaaattatagttgcttaagtttacatttctttgatttctaatgatgctaagaagaaaattactgtttttccaactgtgtaaactatccatttcatttgatcacttttcgagtaaaatctgaatgaagcctatttagaaatttctttacttacaaacaggtttgattcttaaacatttgaaagcccatttgttgaaagtacaaggtaactgtacaagcgctaccattgccatctgttagtggtaggcagagatgtgcttttattcttacacatttgttaataactgacatagtatatttattatcagttattttttagtttggatagtaaactttagtgaataataattactcttccttattttaattctctttcctttttttttttttgagacagagtcttgctctgtcacccaggctagagtgcagtggcgtgatctcagctcactgcaagctccacctccctggttcaagcaattctcctgcctcagcctcccaagtagctgggattacaggtgcccaccatcacgcccagctaatttttgtatttttagtagagatggggtttcaccatcttggccaaacttgtctcgaactcctgacctcagatgatcggcccgcctctgcctcccaaagtgttaggattacaggcgtgagccaccatgcccagccattgaatagtttcaaatagatattttgtttccctgttctgctgtcactgttttaagaatagacctgggctcagattctagttccttctaatggctctgtggcatcagacgacttacttaacctttctgagtctcagtttctctcatgttcaaagaagtgacagtaatacctacttcataatgttgtaggtattgagataatgaataattgaagtaattattgccacatagcctacttttttttagaaagttttctatttttcaaaatctgtgaaatatttagtgagagttttaattgatattatgttaattctatatctgaatctagggaggttttttaaatttttttttttaagagatgaggcttccagccgggtgtggtggctcacgcctgtaatcccagcactttgggaggctgaggcgggtggatcatgaggtcaggagatcaagaccatcctggcttaacatggtgaaaccctgtctctaccaaaaatacaaaaaattagccggtcgttgtggtgggtgcttgtagtcctagctacttgggaggctggggcaggagaatacagtgaacccaggaggcggaggttacagtgagtcgagatcgcaccactgcactccagcctgggcgacagatggagactccgtctcaaaaaaaaaaaaaaaaaaaaagagatgagtgaggtttccctatgttaccaaggctggtcttgaactcctggcctcaagcagtcctcccacctcagcctctcaaaaagcgctgggattacaggcatgagctaccaggcctggccaagtcttttgtttttccttccttccttccttcttcctttctctttctttcttttttaaaaaatagtatttagttttccaaactaagaccaagaactcttgctctatataattatttactatttcctccatttaaggttatatagtttttctttgaaaaaattttgtcattatcaagttaaattaatacatctgtattttatgttcttattactattacaactggtgtctcttattttctatctgtgtaaaagaatatactatatatttgtgggtttatcttatatctaacaaacttgaatcagcagaattattttctatgataattttaagtttgttttctattacttttaaaaatatgtcatttataggggattgatattgttatttattttctgtattttwacctttcttttattctttaaaagttattatgagtattgcaatagtatgttaaataggcatgatggtagataatgctttagtcctcttcttataataataagaaaaaaaggttccttgttaagtctaattatagtacttggttttaggtacctatgatttatatgaataaagatactgagtcatattttgagatggaaccagaaataaatataaaattttattatattctaatgagaagattttatatatcatcagtatttttcctattagtatgataatttatccacttgttattatcattcttgcattccagggatgaattgaatttgatcattaaagaggcagtgtagtttaatgaaaaggatcagtggtttaggtgtcttgtcactaccgttcactagctgtgtaatcttagaaaaggcacctaatttctcaggttttcttattcagaaactgagggaatagagaggatgaaaattctttcccactcttaaataattttaaaaattgttaagcaccatttatgacaatgtttctatgggaaaatacactgagttccagctttgaatattagaaatagatctccctttactgctaacagggcaggtacaattactcttcattgttttcactcttccagtaccacgtattaggagtagggactctaagaaagttttaggaatatgagtctgggagtttgcatggagaaatgggaatggtttgaaagagaaaagaatgttgaggaaatggaggacagaggaggagattcggatagatactaaggtttaaagtggggtagggaaagagctactggaaataggtttatttcccttccttatttgtactccctgatttcttccctctaactccctccatcttttctcctttcctttcactgtaatggcgtgccttctgttctctccttcctcttttcctacacaacggtgaaccattctatggaactggtctggggagatatctgactttagaaagaaaacttgatgggatggctgtggaatcagagtaagggtttagtttttctttggggaaagagagcgggattggagatttctgagtgtcaggaaggaagaagtaatttttgtatatttaaagctaagatggccgggcgcggtggctcaggcctgtaatcccagcactttgggaggctaaggcgggtggatcacctgaggtcaggagttcgagaccaacctggccaacatggcaaaaccccgtctttacttaaaaaacacaaaaattagccaggcatggtggtgcgcacctgtagtcccagctattttgaaggcagaggcaggagaattgcttcaactcgggaggcagaggttgcagtgagccgagatcaccccattgcactccagcctggttgacagagcgagactcggtctcaaaaaaaaaaaagctaagattaggtaaaggcataagactgttgttaagtggtaaatctttggtgctctgtattgtttaatgtatgtgtggggtcatttttaagacaaaaatttgcattaacactaatgtataaacccacatagcatccgttttagaagtgttaatcataaaagagaatttttgaaaactgatttctgtgatatttaggttgcatgcagttttttccaggtgtttatcttttgtcttcagtttggtaaagggaagtacataatccatatgtgttgcagtttcactaaaataaatacatttcctataaaggaataatatatctcagcattagaatggaagatatggaaagctcaaatgaaaccaccccagctgcctactcttagaactgttacttgatttgaaacaatctgttgctatttttgcaaaaagatgtcccccaaatttcccagattggactggggacagaaagcacatactgttgctcctgagtatatgcaaaagttctgcaattcagatttaggaaatcatgtgctcttgttagggaatatgggaggtttagcttttccttcgttgggagggggtgaggttttctactgaggcagtttataaagttacctacatttctctgaatgtactacagattttgcagatgttggtgtccttgaagaaccacacaagtttgtatttcatttgtgtcattaccttttacttaacatacttccacaggtgacacatttccttaggggtatgactataaatgtgcaatatttgttagcagtcttttttcagtcttatgtgttttcacatgtttttttctgtccctaattatgtctgcttccatcagatatgatagttattctgtccataatttcttccatgcacatgtcttttaagaaatctttactttagagttctacctagttgcatccctctttattcaccagattctacagtactacatttttcaaatttccaaatatgagggccttcatttttctctctttctacattcattcttcagtaccactgccaagttaaatctctatctttttatttgtcccaaccaccttttctccatcattcacttccttttttctggactctccatctgaagaacggctcatatatggcaataaaaaaggtacagaccagacagagtaacattgttttgaaatatgacttcataagttatcttcatgtccatgtaagttagcacattcattgagtaatgtctatgcagagtcctcttgggccttgtgcaaatttagcttaagttttatctgtgttagtgtttggtatttttagaagtcatattccaagatatctgtctttctgtgcatggaaatattttccctccttttcattcctgttttaaaatttcattcttttgcttatttgtaatgttttgtacttttccctgcatgattagggttgtttgattgtctattatttcccaaagaaatgttactgtgaccatttactttaatatgatgcatgatgtgtttgtagactgatttaaaatcctgatttgtacagtgtttttatattcctgtgaatttttcatttgatatcagtatagtttacatgtcatttggttttatagatatagaaattaaatctgaaaatatgaatgtacttattacagccatcctccccaacaccctactgcttatccccagtctagctactttaaaattctgtcaattttaaaacaaaatgtttataatcatttattagaagagaatcagacttaccttctatccttgaacaagtcacttaataacctcagtttctttgtctataaaatgaggagattgcactttatagtatctccattgtctcttcaaattctaatattctatgattcttatatttttagtttttgggggtttttttgtggtttttttttttggtattttaaaaatacctgtttagagtgctgtggtacccaggtacccacacagttttggacttgtaaaagctgtagcttcagtgctcataatatttaccctttagaagatcataaacatgtcatggagcctatttttttcccctaaaatatgtcttttgtttctrtctttcaagttggatttctttttctcttttcttgcagtcagatccagtcattatcttagtttttaattatatgtaattgtggactgcttgaattttaaatgagatgttctctcccagaagacttacagttgttcagacctctgtatacctaaggccccttttgaattagtgtctttagcctttccttaaccttctcctcaaccatggtgcttccatgtgtgttttcattgtgttgaagcacggctctaaggaaccacacttttgggtccagagtgattctagttgctatatatgaaataacaggactgagattgatgttgttctttctggaggccaagggaaggaagataaaacctttgagtcattcttcagccaaggatttagttattttggtttattctcttctacatcagttgtagacagcacagctaaccctttagagatgaagcagtagtgatcctttagccatgtttttcttgttgcttatgtcatactcacctagagatgtaaaagattgtatatatttgcatgaccttaggagcacctggtacattaggcacctggtgcattgttgaaatgctggtatggcccttagttcaggattacctgcacagtagctccttcatgccattcattttagaccaactcaaagcaaagaagcttattctgtcatagtctgatgggatattgtcagcctgcatgtcaaatactttgtgatagttaaataagactacaggactgttagaaattcttgtctgttagtctgcatgccataggctgtcatgaaaattaaacagagactataggattattatcagtttttgccctctggtttgtaatgcaagttgggctcaagtttgtttgtttttttttccccattgctgttttactgattagccagtagagtgaaatattaaagtttgtggattactttttatttctatatttatcagaccccagtattagaccaatgctgagctaaacattgagagagcaagacattttttagcatgagttcatctagtcccctccatgtaagctggtggcaggggtcttggtactggtttagatgagtgtggaacaggctaatagaatattgtaagcatgcrtgccctaaacttgagcctttctctctatttattccattgaaagtaggttcagctgcagcccggaaagaaatcataagaaacaaaattcgagcaattggcaagatggcaagagtcttctctgttctcaggtaatgatatattttcttgattatttgttttgcagaaattacgtttattgtaccttgttacaagcattgtcccgcatctaaaagcaaaatggggccgggtatggtggcacactcctgtaatctcagcattttgggatgccaaggcgggcggatcacctgaggtcaggagtttgaaaccagcctggccaacatagtgaatccccatctctactaaatatacaaaaattagccgggcgtggtggcatgcacctgtaatcccagctactcgggaagctgaggcacaagaattgcttgaacccaggaggcagaagttgcggtgagccgagactgcgccactccagactgggcgactgagcaaggctctgtctaaaaaaaaaaaaaaagaaagaaaaaaagcaacaagcaacagggtatcattcttcctataaagaagttacttaggcctggccaggcgtggtggctcacgcctgtaatcccagcactttgggaggccaaggcaggtggatcacgaggtcaagagattgagaccatcctggccaacatggtgaaaccctgtctctactaaaaatagaaaaattaactggatgtggtggtgcatgcctgtagtcccagctactcgggaggctgaggcaggagaatcacttgaactcgggaggtggaggttgcagtgatctgagatgacgccactgcactccagcctgggtgacagagtgagactctgtctcagaaaaaaaaaaaaaaagggtacttaggcccttaggctgggtgcagtggctcacgcctgtaatcccaacactttgggaggccaaagcgggcggagttcaagaccaggctaggaaacatggcgaaaccccatctccacaaaaaagaatacaaaaattagccgggcctggtggcatgcacctgtggtcccagctactcgggaggctgagatgggaggatcacctgagccccaggaagttgtgagtagtgagccgtgattgtgccgctgcactccagcctgggtgacggagtgagaccttgtctcaaaaagaaaaagaagtttatatatttgtatactgaagatgggaacacaagtccctttgaagctaagatttttgactctggtgattgttattgctcatctttggtatctcttttccgtttgtgataacactaaattcacaccttgaaaattagagcaggataagaaggaggggatactttttagagtattcttgatgaacttgttcatccatataggaagtcccttgtgctggagccataaattgccttccctggggttaattcaggaagaccaggttaaagggtacaaatgaataggtcagtctttaaaaatttgtttgcacaactgactacatcagacawttgaacttcagagcatatgaaataccatattttctcaatagtatgatgccccttgatgaatcttaccacatatttaataaagcttttcaggaaaaayaatatatgcctcaatggtaaggcacaccctcatacctgaaacacttamaatatagaaaaattaatgtcttgaaattgaggaaaatatggtaatagcaatgaatgtcatgaattttatatatggcctatatctagaccctatgtcttcttttaaattaagtacttgttggaagtatctgatatttgttatatctctctgctatagggaggagagtgaaagtgtgctgacactcaagggcctgactcccacagggatgttgcctagtggagtgttagctggaggacggcagaccctgcaaagtggtaatgatgttatgcaacttgctgtgcctcagatggactggggcacacctcactcttttgctaacaattcacataatgcatgcagggaattccttctgttttttagttcctgtctcagcagctgacctagacagggtactgtattagctagtgtctcattaatacctgatcagggcagaaaactgatagaatgggtattcctttcaattgaaaataatggtcagttcctcagcttttcatgaaatgatatgggagcagctcatatcataatgtctgaaatatttatttattcatctgtctaattcacccttttcttttaaaagccccagtttcagaatgtgaatcagggatattcctgttactaaaatggaaatgtaattccaagtttcttttttaattttttaaatttatgtcattgtattggactatgcttatatttaaaactacttaatttagagttaactacctgcttaggccccagaacattacttatgcccttcagttaccaaaagatttgtgcaaggttttgtaccctggtaaatgatgccaaagtttgttttctgtggtgtttgtcaaatgttctatgtataattaactgtctgtaacatgctgtttccttcctctgcagatgtagctgctttcctaaatctgtctgtctttctttaggttagctgtatgtctgtaaaagtatgttcaattaaattactccatcagacacttgtctgtcttgcaatgtagaagcagctttgtagcaccttgttttgaggtttgctgcatttgttgctgcactttgtgcattctgaacatgaatgtaacattagatattaagtcattgttataaggggttgaatttaaatcctgtaagtcaaaattgaaagggtgttattaagtgtgcctttattttgcatgaaaataaaaagaattatacgtaaagcattcctgtaatctggctcattgaatattttatacttaaaaaactttttttggcgtaaatatttgtgtaaatactgggttaactttttaaaagcccattacagattaaatagaagagagtgatgtgagtattagtgaccatacacagtaattcagtctagatttcttttcctgtggttggaaagcaaaaatacatgatgtggaaaagcctgaatttcwtgtagtcacttttgacagccctctaagggtcattgtctattaaaatagcaacagatctgatgttttccttagtcataattaggtttctttttggtgttgtaattagtgacttttttagagggaaaaaaataggcaattttaacgttttgaatgaatttacatttgacttcacaatttcatttcacttggttccataataagtgctctttttttttcttttctctcttctcttctctttctttttctttctttctttctttctttctttctttctttctttctttctttctgtctttctttctttctttctctctctctctctctctttctctctctctctctgtctttctttttttgtgtgcatgtgtacatgtgtgtgtgtgagagagacagacagggtctggtttcttgctgtgtcacccaggctggagtgcagtgcagcctcaacctcctgggctcaagcagtcctccatttcagccacccaagtagctaagaccataggcacatgccaccacagccagctaattttttttattttttttattttttatttttttatatttttgtattgcccaggctggtctcaaactcctgggctcaagcaatcttctgacctcagcctcccaaagtgctgggattataggcatgagccactatgcctggccaatgattgcttttcaataaaaaaaatttttttcctgtaaacaatttttacttgtagcctatacatgttctattttaaatgtcattgtattgttcactaccaccactggtatatctgaaaagtacactgtgttttgaaattataaattttcattctgaatgaggtttctttttttgattttctttaaaaaaaaaaaacaacctgctttgatttgctttacattccttgccctccatttttcttattatattgtaaacattagaaaaatgaactaaaaagaatttcatgaatgtacattaaaacaagatcttaaacatttgataaaactagtaaaaatgttaatagaaaaggatgaactttaatagcttcaaaaatattatactcttctttgttcagaaaagaaaaataaaaccaaaagggtatcatacttaaataaatctacagtatagtcatctctcagttatccttggatataacattacttttatattgtatccgcagcaaaccttgctttcagatttcacgattagcccctgctaattacatgctttgttgacttctgtttattcttaatttgtacacggcttgaagctcattccttcaactttgaaaccaccctcaactgcaggggaggtttgaaagacagcagctttgctggagggactctctattctcagcatggactaagttactggaaggaattgagtttaaggggtctaatttgggaccccttaaactagatagcttctagttttgctagctcttgatagtgtggtttgggcatttggtcaaaattattttcctagcataagataaatccactttgaaacaaataacaaaggtcatacaaaagctgcatgtttgtgattattttttaaaaagttatcctacattttaaattttagtagataatgttccctgatgttagtgtgtataactgagagttaggtattgcaaaaggaaaaaattttaattctaagacctcgtgcctatttgtcagaaaataaaaattgtcgtttcaagaactttaaaagttaatttacatgatgtttcttgagtgtttttacaaactgcacaactctattggaggtggattttctgttcatctttattttatgtatgttttctttctgggaaatttgattgggagctagcactgtaatgctaccctcaccaggatctatatgggaaatatatgtggccaattctatgttagtaataccaaattcctcttggtcatttatcttgcatagtactgaggaacacagtttgagatagcactatgctcaaacttattaaggccatgacaagatgccctatataactgaaaacaaatagaggagaaatagtgcctttcagatagagtgttgcaattagcaatctgggctcaagtgatcttcctgcttcagcttcccgagtagctgggattacatatgcacaccaccatgcccggctaattttttaaactttttttggggggagatgaggtctctctatgtgttgcccaggctgggctcaaacgctcaagggatccttccacctcagccatccgagagtgctggggttataggcatgatcttccatgtcctgcccgatttgtaatgtagtttaacagttaaggaaaattaactcttcctttattcagtgttcgtcctaattcttttgggtccccaattcactttactgtctggttaagatcaacattttctaacttagttcactttaataccttagattcatcagtttcttttacattaataattgctttggataaaattatttctaaatcatgttaattgctaaaagatcacttcaggaataattattctaattggccttattgcagaagaagcaaaataggagagaccagggcattacttttacaaatattctgagtaataaggggaatggacaatattgtaaaccagtattgttgtgtgctatcttgagtcctggtcctcagtgtgagctctttatacagttcaaacccagaaatgagcgaaaaaaagaatctttgactataaaatgtttgactaattatggtgaaattctctaaatggaccagtgacacactataccaataatgtatttcttatttataatatgacctatgtgtctatatcatgaaataattagaatttatgcctgtaagacctcacttctcttccttaatgtctctttaattggtagatgagtttgaaaagatgctcagtagtctttttctgaggcaaatttgagttcatgataaactctgtcagtataaatggaattttttaaggctatagatgttagtatctgtaggtatttggaacatcagtactagaatagaaaggaagttactggtagacaggagaagtcctttcaggtcccccacaaagaacagagccacagaactgttctacttatagtaattcatcaagtttactgcccttaaatttcactgtagtcatatcagctcttgcagcttatgttttgccttataaattacaagtaacaggtaaagcattgctgaccccttctagtttatgtcttagggaaccaactggtaatgagtattgttctcactgacatgaaagaaaagacttttctgtttgcttttctgctacaattctattataattttaccctagagcattttcctgtgattgtgatggatgtgatataataaacataatggaaaattctaaggccatcaaattactgattcaagatgggtaattaatactggagtgcatttgcatgggtgctgaggtgtctgtgtttacagtaggtttatgtgttctgtgctctgagtgatgttgtcatagtgctgtgtgtaaactgtgctgtgtcaggaattgggggtttggatggggctctctaatttgggtactatttatgttaaattttaaatgatgatgtagtatgggatactgtgatattttaagtgatcattgccttttctgctgtacaatatgacccttctcatctctctcattcattttgcatgcctctgctcacttctgtacagccacagttgaggctattgaggctgaaaaaggtatgatcagagtccttgtgctgggcagagatctgtggtgtgtgggtgggcatcagagaatgtcctgtgggtgtgttttactcctagcttttacagcccaagatgaatcagactcactgattcatcaagtttagaagccttgcagccctctttttttaatttttcatttttaaatcagaagggctgatgtctatggtgacagtctttttcttctttccggtgtaatatgcaatcagaaagtaatgtttctgatttctttagagtatagcatgttatgctatacagtatagctttataaagttgcctgttttaatggaaattgccaaactgacctgcaaatagagatctgttccatattttgcatgattctatgctactcagattttttttccctaagtgaatcctcctctaggtataggtgtgagtttgtttttacaaactagtgtgcctgactgagaatacaggaactgtcactataatgattttcttttttcttttttggccgcagtttgggctatagtttatggataagattatgttcatatatatatgtgttggcttggtatttcacattcctcagtgtttgtagccccagccatttgtttggttcatgtgccagactaagacctaaggattgcagatattaagcaaccagattataaccagtggtttgaaaatatttcctatgaacactttaataatggaggatgcatcattctagatgaagtgaatgagaaaccatacaattggtggagaattgccatttattttgatttgagtttccaaagactgtgcagtatggccaatgaattaaggagaacatcttctaaattacgagattataaatacttttttgctatcagccatacacagatctaactcttggaggcacttccacctttttaatgttatattggtggcgatgggctgaccttgacctccaagatagttctgatctactgtattttaacctttctttaactctttctcctcccaagctcttggtacagatttgtatattgaggattaaccttgtttagcctcctcacttgcccctactctcattgctgccttactgtgatagtcactggtgatcttagggactgatgtaggagataattggtatagtagaagtcagactgagaccctgagaccattgcctggaggttgattttgggggcaggagagggttaacattttttttgtatttttattttttggaaggctttgctaacacttgtcacctataaagctatgatgtttatatttaggtttaaacatttcacaktttaaggraagactgaaatgaggataggattcagttaaagtaagatttatgtgttgctacttacagctactaatttctttcttcttaaaaatcattaattatgtttttgaaatctcagaaatgtttttcaattactgacttatcaaatttgcattttattaagcaatacgaggattctctccaccacatagaatctgcagttttgaagaggcaaagggtttggataggatcaatgagagaatgccacctcggaaagatgctgtacagcaagatggtttcaattctctgaacaccgcacatgccactgagaaccacgggacgggcaaccatactgcccagtgacccactacttcccagggactctcacatctcgggccccaaatggacagatcacccgaggagctggaggggtcggccaagctgactgtaaatttcacagtctctctgaagaaaccattgtgcttctgagaccctagcccccttcctggatggaggcttgagggccctgggacatgtgctatctgataagattgggtcrtcgctgccaaggtggagagcagtgagcaaggggcttggggcaatttccagtggagggcatccacacctccattttatgcttgtggttcacacatttaagtttacaaatcagatttcttttccccttcagtagaattagattttgtttttcaatcatgatttcaaatgcaatcctaagagctaatgtggacttttctttttccatgaaatgtctttaaaggatgaattagcatggtcttaaaatacatttctgaggttactagctgtattttgaattgtgagcaaaatgccgagaaacccagttggcatttatacaaaatgttgacctcaggtctatagttcttaaatgtggctaattctgtaacatagtcttggtattttttaattatgaatgcatatcctatttccaggcaggctctcttacttgaacacaaatccaaaaactaatttagagtcttttttgcccagatcttttaagacttacaccccagagatttaagaagaaaacctctaaatttcaaaattatgaagaattacagaattactcatttaaggtactttaaaagaagtttgtacattgtcaaagtaaattttaattcaaatcatgtctgtaaaacttgacgtattttgtgtatgcatgttttcattttgcaaatatttaatatatagacctatgatgtacaggtacgacatgtataggttacctagatgttatgagaaattttagtttattgtgagtactcaagttgcttaragagccaccagggtgatttgctgctggctttctatcatttttatgttttaatgcaaaggaaattttaaaatgttctggaagtgtttttgattaagcaatgcagcctagaagcaatggttctgttcaatcattcagatgttagtggaagcataaaagtcaagactgcatgttgaaacctttcttttgatagttactgaactgcttggttaaactaaatggaaccatgtgctaatttttcacaattattgacctgtattgattgccactgtagtttggtatttccctttactttggtggcctgcttccctcatgccctggaatacaactcagagctccaggcagcggaaccatctattgttttgtttgccagaaagtgcaccctgtatggtctcctgtctaagttggaaatattatgcatgtgcaggactattcgagtattttataaacagtagcacacaataaattccatgcatgggccgctgctcctatctctgtgttgggttttatttggaagatgcaatctgatttgtccttttgatgcaaatcagaaaatcctgttactagagctgggatgtcctccggagattatctcgtggatagttcatggtaatttgattaattaaattctttataaattttgccttaaaaaaaacttttgttatatacttgttttacatgagcattagtaactgagcactagaggactttgaatgcctactgtaggcctcctaagtctaatatttaagatcactgtttattgtcttttaattgaaagaaaatatgttattgtctagaattttgttatagtggtattgggaatttactgggtgttctaacaataagaaaaatattagtgataattgcattttcctatcattcctttcttctttgtcataatcacaataagtataggattttgcacattgagggatattaggatattgctcaaaattatataatcatacaataacttgaattatagttctcaacaataattacaatgagatatattataaaacactaagtcaaaatataggcagggcacagtggctcatgcctgtaatccaaacactttgggaggctgagacagaggattgcttgagcctaggagctcatggttgcaggctgtgttgagctatgattgtaccactgtactccagcctgggtgacagagtgagaccccatcccttaaaaacaaacaaaatatatgtaaatatattaggcaagcgcacacacacacacacacacacacacacacacacacacacacacacatgcttgcctaattccaggtaacaaacagaacttctcaaattgtttcttttttctttttcttttgcttttttttttttttttttgagacggaatctctgtctgtcacccaggctggaatgcagtggcatgctcttggctcactgcaacctccgcctcctgggttcaagcaattctcctgcctcggcctcccaagtacctgggactacaggtgcccaccaccacgcctggctaatttttgtatttttagtagagatggggtttcaccatgttggccaggctggtctcaaactcctgacctcgtgatccgcccacctcagcctcccaaagtgctgggatttcaggcgtcagccactgcacccggccacaaattgttaattattataactctctgcttgccaaaatattaacttacaaagcagtccatgagttggctctaaagttattatgcattgcataccttaaagattgttgtctatgttgtttatgaaagttgcataccttaaagattgttgtcgatgttgttttatgaaagctattcagtaaagagtttatctggctaaaatagacccaatagaaaaattaaaaagtaagtaagagtttaactagtatattaggtgccaggaactttcctagcccttaggtacataactagcattatatagtgtttgtgggaatcatgggtgagcattaagtagtattagcaaaaaaactatggattgatggtaaaaattaagaggaaaataagagaaaggaaccaaactcaggaaaagcaaaatacctgaagagtgataaagtatcacatagtgcctcacagaccacttcctacatgttgaataggaacctctttctagtctttcttcataattcatttcacagcataccatttattaagattttttaaatgcaactcatgatgaatacaaattgtgaaaagttcagacttcgtaactttaaatgtttaccagagcaagtcatagtgatagtaaaatataagtattcaacatcaaagtttttctatattactattctcctttatattcattgacaacttctgaattagaaaagtcaatctctgatgtcttgtatcttctgcagttcagccattattaacagaactcaaaacatttgaggttctcagataaattttgaagcctgttaaatttgaagttggcctgaaacttttgcacaaagtgaattacccctattttatttagggtttttgcctattgcaactgattttcctttatccacagctattctacataatgttatgcagtgtttggttgaatccttaacacttttcttccaccttccctgcatgtagtttgtactttttacagtttggggttcctgtgtggatttgatttgccacattccgggacctcattgcgagtgattctgttccccagtttgatgatgttcaaagaagcaggtaagtgagagctggggtcagatataagcagaaagtcagaacttttttatttaaaaattttaaaaaaattttttgagggtaagaaagatcttgcagtcttttaggaccactgccctaacaacttcagataggctagctgtaagtagaaagaagctaggactgtggaattgaatttcctggatcagctgcaattacaaggaggataagagaatggttgagctgattcttttctattttcttttcctagaaatagtatgtatttttagtcattaactagtattttggttttgtttaatatcccagaagcatttattcctctcttaatacaggtaaagtgctcctgatgactctctcactcagagagttatcttacccttctttcagggaaagtgaattttacaagttaattctgcatgtttcccctacaactgatttcattctgtaccattaaatggccatttattttctcccttctacttaatccaagattggacattgttgagttttgtttgaacaatgtttgttatgctgaaaaaggacaccaggcctgggggaactcatcctgtgtctagatcaacaaacagaactccagagggtcctctggttcctcccacttggttggaaaggtgcttaccctttccaatcaaatattgacttctgcactaatccaaagggttttcttctgaagctgtaaactgagaacagaaatattgccttgagtgagagaagtctaggaagcagcaggtttcattttttgtcagcctgcctggcctttacttggctaacacttgggagtgttgacagtcctgagcccccttggcagagaacaaaggttagagagaagccctcaggcagggggacagatccctctttgcctcattagggagaattcagccttgtctgtctggttggcagggcacacttaatcactgagactcagcatttcagcagtttgcaaaggaaagtgatatgaagggacagctgcaagtaagccacaacctasatctgaagagatcaagcactcatttcacttggaggaaagagagaaggaaggaagctgaggacttagcagggtaagtttttttttccgtcaacctgtctgcttgcttagtttataattgagtaaagtatttatcaccccaggcagtgttaatcactgattaaacagctgaatgtggccataattacagtgtccttaatgtatttctccttctcttttcctacccccttataaggatctccaatgaccagtttcagtcttccttctccctacctctccaaagacgttttgcattttttggtgacttacagaaaattagatgagcactccttatctggagatagtgaaaatatgactgtagtttaggtgaaacttgggactcttggtggtaaagaagaagatgggaaacctaggtctaggaatagattaatattttgtcttgaatttggacatgaaggataaaagtttttctaggcaatcaagatcatgtctcctctccagttcttggtgttggtgttctctctcttatactgggactaaattagagcctaagtcactggggatggctagaaaaaaatgaaagggattccctttctaagtggagagcattctagactctggaaagttcaaagagcttactgcaattctttccagcttctcctgtgagtcccctgttttttcctttgtttctctcagtttataacctgtgaacagggagtagcctggggctctttacaggagatttagaaccagggaagctgtgtctgggcctggggtatataaactcaaacatgaacctgatgatgtatatagatgcagatcaaagacctggcttctcacccaccttctttcttttctgccagaaagctaactcatttgtatcatgaacattgtgctctagacacagaggagactgtgacattagggatttttaccaccactcctcttcctcaaactgtgtgatccttttgctttctgaccagttcagccaactcccagattgccaagagctaatcttcctttagaggaagacctcaccttggaaatgcggaaaagtaaagcagtacctttctgaccttaagtggcttgcttccattgcagcaaaaaggcttatgttttaacttcagggagatatctattataaattctgggatttaagaccctagagttgtctcaaatcacactttccttccatacctatttaaaaaaaaaaaagtcattctttcaaggtttaagaaagtggtgtcttggccgggcgccgtggctcatgcctgtaatcccagcactttgggaggtcgaggtgggtggatcacgaggtcaggagttcgagaccagcctgaccaacatggtgaaaccccatctctactaaaaatacaaaaattagctgggcatggtggcgcgagcctgtaatcccagctactcaggaggctgaggcaggagaatcacttgaacccgggaggtggaggttgcagtgagccaagatcgcaccactgcactccagcctgggtgacagagtgagactctgtctcaaagaaagaaagaaaaagaaaatgttatcttgcctgaggcaggtgggtagagtagataaatgctttttgtagaatggcagtgattctgaaaatgcaatgagaatgtgaggtgattaaaagtggaggacagaatgaggttagttgttggaaattgggccctaaagtgtgaagggcaattccatttactcttttggtaaaaggacatgacccttaaaccctaagataatctaatatcattaggtccaatttcttcattgaaggtaatatataggatatggtatacagatgagcttgactatttctgttctgtggactgaaaccatccattcacccatgggataaggggagacattaagagggtggatggaaacataaggatgaggagatagaaagtacaaaggaaaatacaaatttgttcctccattaacctgaggacaggtttttaagagtcatgttgtaagatatggatatgagctggataattctgggagctttttgtttatttttgccacctgcatacacctcagctgcatgatgattctgaggtttttcctaacagatctgatctagaaggatcaaatgtcagatcatttttgtaacaaaacatgatccctggtttgaactttaacagtttcctcattcacactgccagcgtttttaatcctctgttatttctctgtacctgaagacaatctggggattaataactttttagcctctcaatctctatgaataccttccttcctttcttttttaatcgaagtgaaaatcatataacataaaattaataattttaaagtgagcaattaaatggcatttagtgtattcacggtattgttcaaccatcaattttgtcttgttccaaaacatttttatcaccccaaaagaagaccccataaccattaagcagttactccccattttcccttccacccagcccttagcaactaccaatctgctttctgtctctgggtttacctattctggatatttcatagaaatggcatcatacaacatgtatacaacattttgtgtctggctttcttcacttagtataatgttttttgaagttcctctacattgtagcgtgtatcagtatttcatttctttttatagctgaataatatacatcttcatatgtatatttatatcccaatttgtttatccatttatccattgatggacctttgggttgtttctaccttttagctgttgcgaatagtgctgctatgaacattcacatataagtatt

SEQ ID NO: 94208 - DNA, 43220 bp, Homo sapiens
actctttctaaatccactgccttcaggataacattcaaagtcttattctttattcactccacaaacatttctccttgtcgccatgagccaggctttatgctgctgctgggaacaagggaccatagtgccccgaaggagctcccagctcctgcaggaagtccagggccggcctctcctgctatgcctggatgcctgcttcccaccttcagaggccaatagcttccctccatcatgacctctccacggcatcatttttttttacttttttaggagcaactggagagaggaggaaaatctgagagtggtgctctgaaaacctagcaaagcgaatgtttctaggagtggccaagcatgcagtgaggatgatgggtggctgctgggtggagtaaagctaggactgcaaattggtcactgtattcagcaaaatgaaggttcccggagaatttgacaaaagccgtttccaccctggcacagtggctcatgcctgtaatcccagcaccttgggaggccaaggcgggcagatcacttgaggtcaggagttcgagaccagccagtgaaaccccatctctactaaaaatacaaaattagccaggcgtggtggcggacacctgtaatcccagctactcgggaggctgaggcaggagaatcacttgaacctgggaggtgggaggcggaggttgcagtgaattaagattgccacactccagcccgggcgacagagtgagactccatctcaaaaaaaaaaaaaagccacttccatggagtggggaaaatcaatgtctgatgacagtgggtccaagagaaaatgtgaggagagaaattagagacaacttttttgaggagttttactgtgttttgttttttgggttttttttttttttgagagggagtcttgctctgtctttcaggctggagtgcagtgtcctgatctctgctcactgcaatctctgcctcccggctcaagcaattctcctgcctcagcctcctgagtagctgggattacaggcgcccaccaccatgcctggctaatttttgtatttttagtagagatggggctttcttttcttttttttttttttttttgagagggagtctcgcactgtcacccaggctggagtgcagtagtgccatctccactcacttcaaccaccgcttcccaggttcaagcaattctcttgcctcagcctcccaagtagctgggattacaggtgcccaccaccacgcaccactaattttttgtatttttagtagagatggggtttcactatgttagccaggctggtcttgaactcctgacctcatgatccacccatctcggtttcccaaagtgctgggattacaggcgtgagccaccatgcccggccaagatggtgtttcaccgtgttggccaggctggttttgaactcctgacctcggcctcccaaagtgctgggattacaggtgtgagtcactgtgcccggccaggagttttactgtgaagggaaggaatgaatatagttggaggggaaagtggcatcaaggaaaggctttttatcactaataataaacatttcattgaaatacaccattcatacagaacagctaacaaatcttgagtgtgtagctcaatgaatttccacaaggtgaacacactcaggtaaccagcacccagatcaagaaatggaaagtggccaggtgcagtggctcatgcatataatgctaacactttgggagtccaagacgggaggatcgcttgagctcgagagtttgagaccagcctgggcatcatagttagactcccgtctctaaaattatacatatatttttttctgagacagagtcttgctctgttgcccaggctggagtgcaatggcatgatctcagttcactgtaacctccgcctcctgggttcaagtgattctactgcctcagtctcccaagtagctgggattacaggcgtgtgccaccacacccggctaattttttgtatttttagtagagacggagttttgccatgttggccacactggtctcgaactcctgacctcatgatccacccacctcggtttcccaaggtgctgggattacaggcgtgagccaccatgcccagccaaaataaaaaataaaatttttaattagctaggtttatgggtgcatgcctgtagttcaggctactcaggaagctgaggtgggaggatcacttgaacccagaagttcgaggctatagtgagccatgatcatgtcactgcactccaacctgggccacagagcaagactctgtctcaaaaagtgaaaaataaataagaaacagaatatgaccagttgccaatatccccttcatggccccttgcagtcaccaccatctttctgaaaggtaactagtaccataactaactttttttttttttgagacggagtctcgccctgtcacccaggctggagtgcagtggctcaatctcggttcactgcaacctccacctcctgggttcaagcaattctcatgcctcagcctccatagtagctgggattacagttgtgcaccaccatacatggctaatttttgtgtatgtatatatgtgtgtatatatatgtttgtgtatattacatatgtgtgtatatatgtatattacatatgatatgtatatgtatatatacatatatatgtatatatacatatatatgtatatgtatgtacacatatatatgtatattatgtatatatacacatgtatgtatattatgtatatatacacacatatatgtgtgtgtgtgtatatatatatatatttttttttagtagagatgaggtttcactatgttggccaggctggtctcgaactcctggcctcaagtgattcgcctgcctcagcctcccaaagtgctgggattacaggtgtgagccagacctaaacagcatgttctcttttgtgtcttccttcttatgtttgacattgatgtgagattcactcctactgtgggtagcgcttctgtccttttcatcactgtataaaataactttgttctatttacccattttattgttgatgggcattagggttgctttctgtttggagctaaaatgattaacatggccatgaatatttgtgtacatgcattttggcacacttgaactgtattgtagcttctgtgccaacttttcccttcccatggccttctgtggccacctcctcgccttcctacatgatttccatagttgcctgtgacctcattctggccaccttcagtgactctcctgggtgcacctctgaactatggactcggctactcccttgtggtttctatctcagccccagctttgcggtcctgtctcactacatcaagtcctcaatgctggtgctccccagatccagggtcctaaaaaccctttgtacatcctcaatgggcattaccatcttcatgctaatcaacaccaaatctgcctcctgactacaccccccagccagtccaccagcacaaaactgagctcatcaaattcctccaagaagtatgcctccaattgttgaaatgttacatccacccaggtacttgaatcattacctaagaatcattctagcctcctcccttccctctagccccctacaatcttaactctcaattatcaaaatctgatgagatctacctccttcagggctcacagaatcattcccttcctttgtctccaaggcccccaccttgcttcagaatctcccagacttttgagacagccacctcctttttcctcaggcctccccactctcctccactgatccaccctaaagcaaatctgatccggttatcacacaccctccactgtccacaggataaggccaaactcttcagcaaactccaatcctttcaagaactgtccctcacagccagtcccatgtgcccattctagaaccgactggatcaactcaggagtagctcccggcaagtacggcgttcctcctcacctcctggctgccgagggccgtttccttagaaagcacttcccmccagccccaagctccccttctccagcaaccttgacctttagttttaatctcctttaggacgtgccccccaccgtactgccttccccagtccccgcccctcctctaggtgcccaccatccctccacaaaccacagctattgtcatggtaataattccattattagaaggagctttatgctcagcggaccagagctccctgagagcagggattgtggtattatttcaagcactgaatttgttctagtaatccttaaataaacatatgttgaatgaatgaatgcagtaacaggaatgttgagccaagttttgtttttgttttttgagacggagtctcgctctgttgcccaggctggagtgcagtggctcggtcttggctcactgcaagctccgcctcccgagttcagccattcttctgcctcagcctcccgagtagctgggactacaggcgcccgccaccacgcccggtaattttttgtatttttagtagagccggggtttcaccatgttagccaggatggtctcgatctcctgaccccgtgatccgcccgcctcggtctcccaaagtgctgggattacaggcgtgagccaccgctcccggcctgttgagccaagtattaaaccacataaaacacaggaggagaggaaagtattcagagatacgacagggagaactatttgaaacagtgggaccacagaccatgtgaactgtgcagagaggcctaaatagcctggggtttctggagggaagggaggttcctgggtggtggagcactggtgcacagaaaaggagatgaatcctgagagagaggttcctcactgtgaagggtctggtgttggggccaaaggtttggggtttccacctgtccagcatggcttttcaaactgtagggttttttttttttgagtggggggcagggggtgtctcactttgttgcccaggctggtctcaaattcgtgggctcaggcaatcctcccacctcgccctcccaaagtgctgggatgataggcgtgagccactaagcccagcagtaggttgcaattaaatcatgcacttatggccctcaaaatccgtctaggagctgccacaggttcggcgctgtaaaagtaaatatgcccacttagaaaatggggataattcctatgtcacagagttgtaaagattaaatgaattaatacagattaacacactgggaacagtgtcaagtgcataagcattatgtaaactttagctattatttgctattattgtgtttgctgttatttctctctaggagctcccagggggctaagaagtggtgggaaagaaagaaatgattctaagagcatccaataagggctagaatggaagtgagcaaaaaatgctgaggcccacagcacaggttgtactgcggggttcaaatcccatgaggccagcagcacccagggtctgtgagccctccagagttgggccctggtggtcgagtccagtcctgggggtcattgcattccctccctcattataaaatggggcctggaggcccggggcggaagaaaggggtccacaatactgcacggttagaggccgagccaaggctggatccggccagacctccacaggtcttccttagcctccacattgcctcagagtgtggggcgcccggctgggggcgaggtagcggaggcccaaagggggccgaagctaactggacggcagctcgcgatgggaactacgcttcccagcatgcgacggggcaaaggggcctttcagccgcgagcagcgcctcgcaggttctgctgggagttttcattgacctctgctccccctctcattttgatccccgctcttctgctctgggctccgcccccttctgagagccgatgacctggcagagtcccgcgagccgctttcttcttcccctctcattggcccagcctagctgccattcggttgagaggaggagaagttgcttactgattggtggattccgtttggcgccaactaggaaaggggggcggggcagcagctggccccactgagccgctattaccgcgaaaggccggcctggctgcgacagcctgggtaagaggtgtaggtcggcttggttttctgctacccggagctgggcaagcgggtgggagaacagcgaagacagcgtgagcctgggccgttgcctcgaggctctcgcccggcttctcttgccgacccgccacgtttgtttggatttaatcttcaggttgccggcgcccgcccgcccgctggcctcgcggtgtgagagggaagcacccgtgcctgtggctggtggctggcgcctggagggtccgcacacccgcccggccgcgccgcttgcccgcggcagccgcgtccctgaaccgcggagtcgtgtttgtgtttgacccgcgggcgccggtggcgcgcggccgaggccggtgtcggcggggcggggcggtcgcggcggaggcagaggaagagggagcgggagctctgcgaggccgggcgccgccatggaactgggcccggagcccccgcaccgccgccgcctgctcttcgcctgcagcccccctcccgcgtcgcagcccgtcgtgaaggcgctatttggcgcttcagccgccgggggactgtcgcctgtcaccaacctgaccgtcactatggaccagctgcagggtctgggcaggtaaggagagaccggcgggcggtgctccgggcccctggcctcggtgtcggcctcggagagatcaggccaggaaacggaccgggagaagggcgagacccgtccgtccgggttcgccgctcggggacagccgggctagggcctgccatgtgcacccccgcccgggcggaatgttgggcgggagaggccgtcgggaccttccaggggaagaggtggagatccttgggcctaagcccgagccaggcccaccttcacccctttcggattgctccgtackctccttctatctctatccctggaagctctttggaatctacccccgcggggaaaatcaggctcttctaggcactcactttcaccctttkctaaaccatcctcaggatcttcgtttgctgtgatctttgttccttctcaacaaaggaccatggcattttctttcctggcgtttatgtaaaatcatctcagtccctcgccctgtgcacattcctgatgtccactctgctgctttcctaaggccaggtctttttacccaactttcagaaagcttcctgggcttttcctgatagcaaaaaatgcatcccacggtgtttcccgcggaagagctactttcccttcaatctctgkyatcccgtttgctaagcacatgtcttgtgcgtttcccaacttctgaaaagcagaaagtgtcctgttcaactttcatcccgactctgtctcagtacttagaacacatgcttttattttaggaaataccccaacatttgccatagccatcataacctgcaatgtggtccaaggccatgcccacccactccttttttctcctttgcccaagtgctaattgggtgttcagagtggcaaagtgggatctttgccacttgtggtgtggcctagaaatggtttctggcagcctggctgcttcttaatctcatggcctatctcctgcatgtgaccttttaattatrtcctataaatcattyatggtttatttctgttggtttcagtgattatgagcaaccactggaggtgaagaacaacagtaatctgcagagaatgggctcytccgagtcaacagattcaggtatttaagtctgctgtgtggggagcaatactctgaatttcctgaaacatgccttttcacccaggaggttagttttggtgagaacttgaggaagtcatggcattgggtgataaacttttttttttttttttttgagacagagtttcgctcttgtcgcccaggctggagtgcaatggcatgatctcagctcactgtaacctccacctcccgggttcaagtgattctcctgcctcagcctcccgagtagctgggattacaggcatgcaccaccacacccggctaattttgtattttttagtagagacagggtttcttcatgttggtcagcctggtctcgaattcacaacctcaggtgatccgccttcctcggcctcccaaagtgctgggattacagcgtgagccaccgcgcccggtgataaacattattgagaacaatacaaaggagcccttgtggctgtttatgaagaaaggaaataggtttcaaatgtctataaggaggtggtgtgtgcttgcccttgaaggatgggtagtaaagtataattcaccataccactgtaagtggcattcaggcaatcttactggttaaaatacaggatcaaatgattggaagtacagtgtcatgaaatcatttcagtgatgctgctatggaggaaattgccagtgcatttcattcttcatgaattcatattactgcagagtttatctgtatttgtacagataagaccattggkgcaaagatcctttaggttaaaggaactgcaagagcaagtcttaaaatgtaatgtaggcttctgtatgtagaatgtaatttaatatagaactggggataggattatcacttgtagcagtgtggtgagcaagggctgtaacacctcactttccataaggctgtatagacacatgagctatgggtgggtgggtctgcgtcatctgagctggcatattartaatgctgaacagtgtctccttcaccctgctgccttttgtgagatggacaccttggtgtcattttgttaaaggcagcaagtgcttgccttgcatgtcatgaccagtagttgtatttttctttttcattttgagacaaggtctcaactctgtcacccaggcaactctgcctcccagatttagagaattcttctgcctcagcttccctagtagctggaattacaggtgtgggtctcaaacttctgatctcaggtgatccacccacttcgacctcccaaagtgctgagattacaggggtgagctactgcacctggcctttttttttttttttttttgagacagggtcttgctctgttttccaggtctcaggctggtgtacagtggcacaatcagggttcactgtagcttcaactttccgagctcaagcgaacctcccactccagcctccccaagtagctgggactacagacacgtgccaccacacccaactaattttttttttaactttggtagagtcaagtctcactatgttgccccaggcttgttttgaacttgtggcctcaagccatcagcctgcctcagcctcccaaagtattggaatcacaggtgtgagccactgtgcctggtcagtagttgtatttttcaagcctcatatgatttgacaaggtaaaacgtttaaaaactatgccaagaamatctggtacctattgtttctatggttggaactcacagaaagttatctgggtcacctctatctgaataaccaaacaatcatgatatgaatcagttttattcaccctcttctcaaatcctatttcccttgatgttatttgcaaataggagaaaaaacagtaaatacgctatgaaaatattaagacttgtacaaacatgacatttttgacaatctaatagacgtaacatcarttctggcaaaagtacaagccatgaatatttgttgcctgacttaaataaagacccaggtactttgtttagtgttttaattttaatgacaaaatggtgttttttgtattatttcttgagaggttttttttttccccataggtttctgtctagattctcctgggccattggacagtaaagaaaagtatgtattcactgctttcaaatgtttatatgtagaaaaaacgtgtctaaacttaaataccttatttaaatgaagttcttcatacactggactggagccctggatttacctgtgcctagaaacactctggaatctcaagaatgaatagtttgtgtcagcaattttcagaactttttctcctttattttagctataattttggtgttctgtttgggtcttacccaaacccttactctgtgctctgacatcatagccttacaagaacatgtggggtttttttgtttgtttgtttgtttgtttctgaggcagagtctcactctgccgcccaggctagagtgcagtggctcactgcaacctccacctcccaggttcaactgattctcctgcctcagcctcccgagtagctgggactacaggagtgcaccaccacacccggttaatttttgtatttttagtagacacgaggtttcatcgtgttggccaggccaggagttcgagactcctgacctcgtgatataccctcctcggcctcccatagtgcccatagtgctgggattacatgtgtgagccaccgcgcccagccgaatgtgtgtattttaagaaaagacatgggtttgttttttttcacctagaagtctagtgttgggggtgctcctgagaacaggacagcttcagaaatttattctcccatctcttgcctaaaatgggagtctgtgactgtacccccaagctacaggctaaacactatctctctgctaatatgaatacctctttacttgttttattctcattatttaccttctgatctcattacagccttgaaaatcctatgagaagaatacattccctacctgtaagttagttccttgtttattttgagctaatacctgttatctgttccttagctaccagcatgaccttgataggagacttaatttagagagtaaaaactgcttttctttagtctcttttgagacaaggtcttgctctgtcacccaggctggagtgcagtggcaaaatcttggctcactgcaacctctgcttccctggctcaagtgatcctcccacctcaacttccagaggagctgggactatatataggtgcacaccatcacacccggctgatttttgtattttttgtaracatgggggtctcactctgttgcccaggctggtttcaaactcctgcctcggcctcccamagtgctaggattataggcaagagccactattcccagcctttccttagtctcataagtactcaagatgttcggtctggaggaatttgtcctccatctctaacagagctttattaaaccaggaagggttcttttgatgcaaatgttatttggggattgatttggcactgyaatccctgttgaggggggcactgtagaccttgtgaggttarctgtaaacccatggaatggaaacttctatgctgtgtcctggctgtgtcctggcaaggtggattcctggccacatttactggttacctactgcagtgtgtgaggagctagtctaccccctattcaaccccccttttttttcttttgagaactgaattttccactgaaattttatttgtgtgccttaattattttccttttttactttgatagcagaagctgttgggatgtagtccagctctgaagaggagccattctgattctcttgaccatgacatctttcagctcatcgacccagatgagaacaaggaaaatgtgagtgtgacttcaatgtactaacctgaggcagaggtgaaacccacaggctgtcagtggcttagaagtggctgggctgctttctgggagactaaacttggccattatgtgcggtctttggagtcagagaattctgggtttggatcctgcttactagctgtgtgatgttggcaaattcttctctttttaatctttgctcttttgtaaaataggagtagtaataccttttagggatgttgtggcaataagtaagattatgtatgaagtattgaaaatggtgcctgacaggcgggagttgctcagattgtagctcacaggagtaattacatgtacaaatagtgtttgtctggaaggctctgcccaggctgtccttgcctctttgctctgaccctgaaatgaattgtaagcttaggaaaaggctctttggcagtatttgtaagaacggggtcaacaagttctagggaatctcagagtaactgaaatggtggcttggaaggtgaatttctggttatctaccctgaatgagcctggcttttttgttcttttagacattgcacagagtaggcatccaaaacagttgtaattttttcagccttctctctactgtatttctatatatttactttctccccttttccattcctgctgaaatgccacagttcataatccttgtccttacaatcttcaggtttagtgtgaaacccactgcctscatgaactctcctgatgatttctttatcaacctgggaagtgtcatgagaaagaatatggaaatgagttccagccttgagtgcttggaacagtgtatcagcctctagtgctttttaccagggcaaagctgtactgatgcctggttttcccccgaaatagcttctcagggttgcttgcctggagctttgttttaaagggaaaacagcatagatggtggttaaagagctctcactctggagttgtcctgttttacttcaatattttgggcacattccttaacctgcaaggtctagttttctcacctgtaaaatcgggacaatcaggwtgtatttgatggttaaaaagttaatgcacagaaagtacttagtactgtgttggcatagaaatcactgtaatattagccattactgctttttttttttttttgattcttcatggttttatttctctcagaactttaaaatgtgaacattctataattcagccagtctttacttccaggtaacttctttattgggtcgcaatacccttttaaataacatgctcttgttccggaaggtagttagccgttcatcactctttctgtctaaataacatccagtgacaaatcccatagggacaagaacatgaacccagtggtcccgcacaatctgaagtaagttcaccatgatagctgcagcctcagtgccgaccgcgaccccgagaccaagggcaacggggaactcagccacccacgccagtgctagccattactgcttttaatacttaattatgagttcttaagtgaatattttagggcaagggacctgtgagtgttttcattccataaagtggaatcatacgatrtgtattctatcatatctggctttaaaaaacattatgcttgtaagaatcgtccacgttgagtaaaccagtagggcttttttttttttcattgcttttagtatagaatagaataattataagtagaaaaaattatctccagttggtaggaagaggtggaaaatatgaagccctgaaacagatggacctagatggaaaattttgacaactattcacaggcaattatattagattttatttatttttgctttagatttcagaaagtttgtgatttagcttattcatcgtgttttgtatatttggcagatacttgtgttaggaaatacagtatgacaagaaaaagatgttactttagaagttagctgttgacagagccttggaaattcttagttacgcagatctattgttggaattaggtgaaactttaatttggaggcagaaaggtgatcagtgcccactttcttgcctctttcacccaagctgaggcctgagttggttttcatggacagtaratgtctcaactatgtcttgcaggaagcctttgagtttaagaagccagtaagacctgtatctcgtggctgcctgcactctcatggactccaggagggtaaagatctcttcacacagaggcagaactctgccccagctcggatggtatgtgctctggctttcataggggaattcctgacaggaagaaaggattaaaacaccttctttcatccagaattgaaggcactacagtagcactagctgtttttaccttgactttgtcttttgaaattagactgtcaagcattcttggtggttttgctgtgtctggagaacagacaggcggtagtaagagtgggagatggtgtttgaaatattggagttgtgcaaggaataatcgaccttgttaatctgggaaatcctgggtcatcctaaatgtatgtatggtgggattatatctcttcctatttttttctttttttctttttttttttttaagggctttctggcaaaaaccggaaagcctgcgagacaaattttaaaagagccgtaacactagatctcttacttaaaacttggtctttactatgcattctaagtgcttctcaaggaactggagagagagcacttgacttcttccaaaggtggtttgttaagaacagttatgggccaggtgccatggctcatgcctataatctcagcactttggaaaactgagacaggaggatcgcttgagtcctgggcagcatagtgagaccacatctctattttttttatttttaatttttttaaagaactattatggattacagtgaatgctcaggctgctgggcagttttggggtcactcgtttcagggctatgtatttgccagacagggactgtcattacttccaaagtttcctgctgttggtctgaattggattaactgatagcatctatagattggagaggcccaacttgagcaagatgaccacatttggcttccaggtttacctaggatcttaaatctgaaaatatacctttccaatctgctttgtgttctgaggttcagccagtattgttactctgtctatcatttgcacaaagcacttttatatgttcttgtcttgtgaagtggagttaatccacttgaacagattaggaaagtaccactagagaggtttggatgatttaccaaaggatatacataagtaggaaaccaggatttaatgatctctggctgggtgtggtggctcatggctgtaatcccagcactttgggaggcygaggtgggaggatcacatgaggtcaggagttcaagacagcctgggtaacatagtgagaccctatctgtacaaagttaaaaaataagctgagtgtggtggcttgttcctatagtcccaattagtcgggaggctgaagtgggaggattgcttgagcccaagaattcgaggctgcagtgagctatgatcagaccactgtactccagcctggacaatgaatccctgtctcaataaacaatctctaaattcccaagtacacagtaatgctttaagagttgggtatcagaaacaatatatttggtgtgtgcttagcgactagagcctgtatcacatctgcacctaggaatcccagaacatacctcacaaatgttggtgtgatatagtgtgagctttcgtgataaaggtactgccccataataaagttatctacccctaggctaaaaaaatttgccatttcccagagtgtgcacttggggaggactagagactgctcagaacttgttttatattgtgaagcaaagctaatgccagaaccagaataggccagctgcagagaggattccttggtgcatgatccactcagaaaatcagagggccacttaactaacaacagattcataccccaaagagatttggattttaaggattacttgtaggtcataacattgggactaccctgctactgtgaaaaaaataactctaaacttttttttctggatttgaaagtgcctagaaaataaataattcagtattagcagtgtttgtattggtaggatttatcttcaggtgtggatttatgagcagtttttctaaattttctatattccatgtttagaggtttcccaaaaaaagtatgactataggttggctaatgaggtaccgccattttaattccaggaatggttttctcctagggagatagtgtggtgagaagagtttggattttggagtcaaacagatgaggtgtataatcttggtaacctcttaagcaccagtttcctgatttgctaaagaaaaaggaaaggattagctacctttagtgtattgtgaggcttctattggattatatgtataaagattatatcgtagtatctggcacacagtaattcctcgtttaaaaactgagcatttaaatcccaagtctaaagaacgaggatagattttatagarggaagttaccctttattcccccctgtcagaactggagttatatataagtgcattctctaggccattttatggtctttatagagatttgcatctgcttgccctaactcatttcagcagattctcatactgtcacagtcctcaatgctgatcggtgttcactgatgcaaccttctaataaaagaaaccttgttcttcacaagaggctatctctagtacccattataaggtgaattgcttctggcaagagttctctgtaaaggctactgactactcagggctgtgtgtggtcatcaaatcatttataatcttgggatacattttcatataatcagtaatggctaaaattttgctttgtataacaagtataacatagtatgttttcatcataaaaactagtgacccatycaaggaaatgaaagtggatcagagctctcattattaatccatgaattttgtcttacagctttcctcaaatgaaagagatagcagtgaaccagggaatttcattcctctttttacaccccagtcacctgtgacagccactttgtctgatgaggatgatggcttcgtggaccttctcgatggagagaatctgaaggtaccgtgtgtgtgtgtgtgttcctatttgttctactaattaattacctctggagaaggcatgtgatgtgaaaaagaacagcaacagcagttccccggggcttgcttagctgatatttttgttcatttggtgataattcatttaataatagggctaccagccttattaaatcctttggattgggggatgggggcatcaaaagaagacacatgatccttcttaccctgaaggagctaactaacaatctatatgcaagaaacatgaaatcagaacggtataggatggtacattaaggatacttcctatccaggcctatctggtattgttcagggagaaacacacctaaagcacttaaacaaatgttagtctctacaggctctttttaaaatcagtttttctgtttctttagaatgaggaggagaccccctcgtgcatggcaagcctctggacagctcctctcgtcatgagaactacaaaccttgtgagttgttctagtgtgtctggaggaagccctgcgtgattggggcactggacagagtagtccttagttgagtatagccaaagattgaaatgcatgataggatttggggatctgggttttaggcctcactttggctacctacaaattatgacctttagtcatgrtatctctctgcatgtctcctgatgtataaggagtgtgggttaggagggaccatggtcattcctagcttttaccatctagtcagtttgaaaaaagcctatctgaagcctttagcctgaatactttactttttttaggttattctcatttatattccacagaacctagcataaaattagacaagcaacagtaactcacaggattttttttgtttctgtgttttttgtttttttttttgagacggagtctcgctcttgttgcccattctagagtgcagtggcacaatcttggctcactgcaacctctgcctcccaggttcaagtgattctcctgcctcagcctcccgagtagctgggattacaggtgcctgccaccacacccagctaatctttgtattttcagtagagacggggttacattatgttggccaggctagtctcgatctcctgacctcaggtgatctgcccacctcgacctcccaaagtgctgggattacaggcatgagccactgtgcctggctggatgttttttgttgctgttttgtttgtttgttttgttttgttttgtttttcattgaaaatacctacctgaggctgggtattttcaggtagatattttcgattttaaaaattatatataatatatattttatatatatatatatatatatatactcacacacacacatacacagtatagatttgtgtttccatcagggatactttcaaacagaaagcatagtatatgtagatacagaatctatagtgtatgtgtgtatatatattcaaaatcacatatatatacacacacatacacatgctatagattcgtgttttcatcatagggatactttcaaagttagaagcaagaatgtgcctatacagatatatacacctgtatgttcagagatatacacccttaggtacacatctaaattgataagttcatattttttaattctcaataacctgaactataattacagaacaaatgagctacagtttttttgtttgtttgttttgttttgtttttgagacrgagtctccctctgttgcccaggctggggtgcagtgcagtggtgtagtcttgacttgctgcaacctctgcctcctgggttcaagtgcttcttctggctcagccttctgagtagctgggactacaggcttacgccaccactcccggctaatttttttggtatttttagtagagacgaggtttcactatgttggccaggctggtctcgaactcttgacctcaggtgatccatccacctgcctcccaaagtgctgggattacaggcatgagccaccgtgcccagccaagctacagttttgagatcacttatggattatagtacattcatgtgcatagcttttgagaaaatatgttaacgcagtacaaatgttatgagtaaatttaccaggtcattttgataggcataaaattacataaaatgtgagaacactttggaagtggctgttagttttatagatttgattttagagtcataagcatgggcttgtaagctcttaatagtggggaaatgtcttccacaaatggttattacaaactaaccattgctgggagctgtaatggaaaataaacttcacacaaaagaggaagaaaatccccggtctctatgggagcagatgtgggagtgatccattctactggggactatcaggaagatttcaaagaagtgacattgaaatgttagcatcaacttgaaaatgaatggtttactgagatgtgaaaggacattctgtgcagaaggaaaagccaggccaagacacatggagtcgagaataggctgagatgcgtttagagagctgactcttgctaccactggtcagattggcttcccttgggctctggaaaatttgtctttatttatttatttatttattgagacagagtcttgctctgtcacccaggctggagtgcagtggtgcaaatcttagctcactgcaaccaccacctcctggtttcaagtgattctcgtgcctcagcctcctgggtagctgggattaaaggcacgcaccaccacacctggctaatttttttgtatttttaatagagatggggtttcttcatgttggccaggctgttattgaacttgtgacctcaagtgatcccacagtgttgggattacaggcgtgagccaccgcgcccagcctgggaaattagtctttaaaagaccaagtagaaaaaaagactttgaacacaattttgaaaggcatttgctactctgcccatccccactccctccaaatttaccatcttaactataccttaaccaaagatgcccccatttttattataacctggctactgtgcatcttttctggatttaagtggggtatttaaacccgttgacctgcttaattaagcaaggtgcaagtaataaaatggaggggaagataggcaagccaaaaatgtgttcctgactggaaggtcacacttctcttgacgcaggattatgtagacagtttttgtgagggcaaaggacgttttgctcatctctatataatgtcagctgagtatatattcattgagcactaagtgctcagtgcctactatgtgccaggccctgtgagagttgctaggactagatgaatcggcagtgtctgttggctaatttagaattgatcttagatcatcccaggaaaccttcggtttatttgtyttaccattcaagtgaacaggttttaatgaaagatgggtctgtctgttttttttcctgtaaggacaaccgatgcaagctgtttgactccccttccctgtgtagctccagcactcggtcagtgttgaagagaccagaacgatctcaagaggagtctccacctggaagtacaaagaggaggaagagcatgtctggggccagccccaaagagtcaactaatccagagaaggcccatgaggttagtttcctaggttcctttttgctctagcacagatactgtatttttcagttctaaaaatttctacttagtggttcatttattttctttgctaagatttgctggggttttgtggggttgtgtgtgtgtgtgggtgtgtgtgtgtttcttttaatagagatgggatctagcgatgttgcccacgctggtcctgaactcctagcctcaagtgatcctcctgccttggcctcccaaagcactgggattacaagtgtgagccaccacacctggctgatacttggctgttttcatgttggtttttcatttgctttgagtatgttcataattgcctgttgaagcatttttaagatggctgctttaaaatctttgtaagacaaatccaacatccatccatagtgttgttggcatctgttgattgtcttttcctgttcaagttgggatttttctggttcttggtatgaccggtgattcttccattgtctcctgtatatttgtgagtctccggtctatgtaaattttaygttttagcaggcttcctctgatactgcaagaaaggcatgggtggaagtccgggttccccagcacaaactccattgacaccttgggtggggacttgtctcattattgctgggagggagtggaagttcattccatccccgtggggtggtgactggggcactgtatgacagctgggcaaaggtggaggcccccgcttgctgttggccataattgtttctgtgttgactagtagaatgattattgtctaaaagtcttctgcctcaataggccatcctttgcctagggagagcaggcttttcttggggcttgttgtgttgctgtctccagcttcatgagttgaatggttaactcattcgtttttaattttcttatttctggataaatctatttgaatctatgaatttcccactgctttagatttgtctcataacttttgacctgaaatgtttttattatcatttgttgtagatattttatttccttttaatccagacctatcatggcctattaaatacttgatttttataaaggtctgtcttttttttttttttttttgagacgctctgtcgcccaggctggagtgcagtggcgcgatctcagctcactgcaagctctgcctcccgggttcatgccattctcctgcttcagcctcccagtagctgggactacaggaccccgccaccacgcctggctaattttttgtatttttagtagagacggggtttcacagtgttagctaggatggtctccatctcctgaccttgtgatccgcccgcctcagcctcctaaagtgctggaattacaggcgtgagccactgcgcccagccctgtctgtctaattcttcaagttaattcattgcattgctcatagttgtataggctgttttgttgtttcctgtttctgagacagggtctctctgtcacccaggctggagtgcagtggcatgatctccgctcactgcactctccacctcccaggctcaagcagtcctcccacctcaggctctcaagcagctgggactataggtgtgtgccaccaaacccagctaatttttgtattttttgtagagacaggctttcgccatgttgcgcaggctggtctcaaactcctgggctcagggcaatcctcccgccttggcctcccaaagtgccaggatcataggtgttagacacagcacctggcatgggtgagctagtgtcatggttgtctgggcctaagtcctatggtcctttgtgttattttttctatttattctgtggctagacacacaaaacactggtttatttgtatgtttttccttcattatactgtccttatattgaggtttggtattaagcattataaaatggtgaactacctgtgttttctgtggcatgaaaaggtttaagtaaatctcatcacagtcttaaaaggttagagagatgacagctaggaaaacatttagcatttaggcctactgccttatcgtatctgcttttgtttttaatgctttatgaatgtttttaaagtattgttctaaaagaatattttaataattgcatagtatttttgttttgggagagttgtttggttttggtttttgttctttttgtttgtggggggcacagggtctagcgctgtcactcaggctggagtgcactagcacgatcacagctcagtacagcctccatgggctcaagcactcctcccgcctcagcccccctagcagctgggactacaggcatgcaccaccatgcccagttaatttaaaaaaaatttttttttattttttgtagaaaagaggtcttactgtgttgcccaggctggccttgaattcctgggctcaagcagtcctcccacctcagcctccaaagtatctgggactacaggcacaggccagtgcacctggccgatagtgttttgacttacaagtatactagaaataattgaataaatcaccttctggacatttagaatttcccttcccctgattttccttttatttctaattaaaaatgaaattctgggttataagggcaagaacatttgtgaaactttacattgtatacatgtcagaaaatatctatcaatatttaataatattctggctgagtgctgtggttcactcctgtaatcccagcactttgggaggacaaggcgggtggatcacgaggtcaggagttccataccagcctggccaatatggtgaaaccctgtctctactgaaaatacaaaaaatagctgggtgtggtggtatgagcctgtaatcccagctgctcaggaggctgaggcaggagaatcgcttgaacccgggaaatggaggttgcagtgagcagagatcacgccactgcactccagcctgggtgatagagtgagatttcatctcaaaaaaaaaaaaaaaagaatattcattttctttttctttctttttgagacacgctggagtgcagtggcaggatcttggctcacggcaacctccgcctccccagttcaagcaagtctctgcctcagcctcctgagtagctgggattacaggtgcccactgccacgcctggctaattttttttgtatttttagtagaggcggagtttcaccaagttggccaggctggtcttgaactcctgacctcaggtgatatatccgccttggcctcccaaagtgctggggttacaggtgtgagccactgtgcccggccagaatattcattttcttttaccgtaatagagattgacctttttatttccatatttgtaaaactttttttggataaaataatactgttaataattattttgtatatatattggccctcatgttttggtttattttcatatattttaatttttagtattttaaattccattgtggagaaaatgtcaagcattgctagagtacagttatcatacctgtgatattgtgaaatatatatttagtcttcttccccttctgtcatataactcctaaaatctttggaatatccaaggtcatatctttttgtatactaatgattgatagcttcagggtgggactggtcactggaaagacagagacatgattagaggttggaactttcagccccaccctccaatgtctacggaaaggagaggggctaaaggtcaagttgatcactcatggccaatggtttaatcaatcatttctatgtaatgaagcctccctaaaaccttgaaaggacagggttcagagagcttctggatagctgaacacatggaggttcctggaggttggggcacccaaggagagcatggcagctccatgtcccttctcccatacctcaccctatgcatgtcttcttctatatcctttgaatatccttcataataaactggtaaatgtgttttcttgagttctgtgagccacttctagcaaattaaacccaaagaaggggtcatgggaacccctacttaaagctggtggtcgtagatcagaagatccagaggcccaactggtgtctgaagggtggtgtggttttgaggactrggccctcaacttcctgatctgacgctctgcaggtagatagtgtcagaattgaattggacggcacccagctattttccactgcagaactgcttgcttgcttgcttgcttgctggtagggagaaatcccctcatatctgggggtaacagcacttctgtcttctgttgctgttgagtgagggaataagaaaaatcactttgagtttgtggggtgttttcctcacacaaacatatcatacagggctaaatttctgggtgtttttttgtttgtttttttttttgagaccaagtctcgctctgtcgcccagactggagtgccatgggtcgatctctgctcactgcaacctccgcctctcaggttccagcaattctcccgcctcagcctcccaagtagctgggactacaggcgcccaccaccacgcctggctaattttttatatttttagtagagacggggtttcaccatgttggcaaggctggtctcgaacccctgacatcaagtgatccactcacctcggcctcccaaagtgctgggattacaggcatgagccaccacgcccggcagagctaaatttcttactatcaaatgtcaaatatccagtctgggttcagttttccccagttgtctcctaagtacttttacagtttatttgttaaaatctggatccaaataaagtctatacactgtagttggtcaataggtctcttactcttcagatttcagtgctccatctgtttccctcttgcatatttttatttgttgaagagctcaagtcatttgtcctgcaaaggttcccacagtcctgtggggtcttcagacattgtcttctatcccctatattgccttaacctaactctggaaaggatggattgaattccagttctatttgtttggcaagaatatcacataggtgattttgtctactttgatcaggaagtataatgtgccaggcagccattggtgattgctgcccagattttttacttcatttcaccagggtttcagaaagatgatactgcagtttttacattctttcctcattaattagctagaatatatctataaagagaaacttacactcatcaaacactgtggttacccttgggaaaggcaggatgaatattggatctctttatttgccagtttccaaataatgccctaccaagcatcttccaaagttgaaagcaagacttatagttgtttttcaataataatcaggaattcatgggttaaaacatttaatgtgtttctgtgtattacaagtattatccttttactcaaattatcccctttttaacagctggcttcctcttctcattgaataaagctaagacgtaggccgggcgcggtggctcacacctgtaatcccagcactttgggaggccaaggcaggcagatcacctgaggccaggagttcaagaccatctggccaacatggtgaaaccccgtctctactaaaaatacaaaaattagctgggcgtggtggcgcacacctatagtctcagctgctctggaggctgcggcagaatcgcttgaacctgggaggcagaggttacagtgagccaagatcactgtactccagcctgcactccactcctgtactccactgcactccagcctgagcgacagagcgagactctgtctttttaaaaaaaaaaaaaaaaaaaagttaagacatactttttctaaacttaatcctagttttaaccccccttgtttctttctctttttctggagatagtttcagtctgtcacccaggctggagtgcagtggcaccatcaccacttgctgtagcctcgacctccccaggctcaggtgatcctcccacttcagcctcccaagtagctgggactacaggcacacaccaccatgcccagcttgtgtgtgtgtgtgtgtgtgtgtgtgtgtgtgtgtgtgtgtgtgtggacagggtcttgctctttgatctggtctggaactcctgggctcaagcgattcacctgccttgcccaggctggtctggaactcctgggctcaagtgagtaacccaccttggcctcccaaagtgctgggattacaggcatgagccaaaccacctgcacccccttttttttttttttttttttaaggaaggaaggaaaacttagtttcagagcaattcggttagacactggaataataggagacctagtcaataacccacatctgtttttgttcactccagattcaataaaataaaataaaaacttcttactaaatgtaggcattaacattttagtctcctcgagacatgctccaagtgaatgttttcagaagttccattcagaacccttgtctcattctctacctttgatttgttacagactcttcatcagtctttatccctggcatcttcccccaaaggaaccattgagaacattttggacaatgacccaagggaccttataggagacttctccaaggtaattgcaagcagagctgctctggcaagtgtaggagggagtgtgggtatttagaatcccactcagcctgtctccctccccagggtggttcctggcatacctccaaaaggacacagttaaaagaatgttaaaggtagggaagcaaacttagtttctcatgatcaggtatatgttggtttctgagactgtagatatcactatagctgatgggcagttttaggtagggagctgtccaccaaccaccttgattgtaacccaaagactaggctctctgggaactgtgttattataaaaatagtaattagcaggatagtgtacagcagaaataaatctgtagccacactacaagtctgcatgttgaaaggttatcttagaaggtctgggattgagactgaatttctccgttcagagaagcttggccattgagggaaaagaccctccaggaagtctagaggaagatcttctaatagcctgatatactacatgaaggcttggctgcagtaaaatacaaggctaggacagggaatgtgtcaatagcagcttctttaatcacattttgacttgaaggttaccagatcaatgttttattcattaatttagttaacatttattgaagcacttatgtgttaggcagagattccaaaatgagatacagttccttccctcaaagaatttagcatgtggttggagaggtgagacgtgaactacatgtaccacatggtagactgaaataaattttagtgaggtgtaaacataaacagcatgccgtgagaagtaaaagggtttatcttggctagggggttggggaacgtctggggttgggccgttgatatttcagcccaaatgggttttgaaggaacggagaatgaagagaacaagcaaagatccagctgtatcctcagttttggaaccttctcttgtttggcagggagagatgtggtcttactatgttgctcaggctgtagtgcagtggctattcgcacatgctatcatagtacactgtagcctcaaacttatggcctcaagtgctccccctgcctcagcctcccaagtagctgggactacaggcatgcaccaccacactcagtggaattttcaacttgaattgaggcctggttatatttgtcttaatgggcctatgcatggggatagatgaactcttggctcagccagtcaccctaatgagtaattgctaatgtgtgcatcttcctcctcaaggctgggctaggtctctttttttcctatccccagtgcctggcaccatgctggacatagcaggtgctcagtaaatgagtgaaatctgtatgtttaagtgctattcgcagtctaactactgacgtgtggattcttgacaaaagcaggaggaaaatgagattacctgaggtttctttatttaaatctgccttactagctaggtaaccttggataaggtgctcaaaatggggataatatacctcattggtttgtgtgaaaattaaatgtcaggatgttaatgaagtaactagaagagtaactagtgtgtactaactaatgtttgtttgcttgtttgtttgtttgttttttgagagggagtcttgctctgtcacccaggctggagtgcagtggtgcaatctcagctcactgcaacctccgcctcctggattcaagcgattttcccactccagccttccgagtagctgggactataggtgcatgctaacgcccggctaatttttgtatttttaaaagagttggggtttcaccatgttggccaggcttgtctcgaactcctgacctcaggtgatccactagcctcggcctcccaaagtgctgggattacaggtgtgagccaccgtgcctggccattaatgtttgttttttaaaagatgcctcctaccagccagacaaaacagtataagtgtgaataatatataggctttcagattctctaagtatctttttttctttttaagggttatctctttcatacagttgctgggaaacatcaggatttaaaatacatctctccagaaattgtaagtccatccttttgaaacccaccacacatcgggtacttgaatctagttttccctgacggtcaaagttgattctccctaattttctctcaacagatggcatctgttttgaatggcaagtttgccaacctcattaaagagtttgttatcatcgactgtcgatacccatatgaatacgagggaggccacatcaaggtatggattcctgagacttgctgtagaaggagccctaaacaggatctgtggttttaaagtggggaggacagtgacacctggccacttagctcatatgctagttgttagaattttgaaacaatacagtgagtgtggaaggcatttgattccgggtgctcttaacgaatgttcccttgtctgcaatactctctaccaccttgtgctacagttattcttcatgtttgtccctcacaccatcattatcaaggacacttgtaggaggtacccactgatgtttaagtcattcgggggacaagaatgggtttcatagcatttaagaggcttgggtaccaatgtctgagcaccccagggctcctgatgaggagaagaccatctctggcaacatgtcctggtgtctgtgccaggcttagtgatgcctccaaagttgattgttcagcaagctgcctggtggaggggcgtgttgggacacacgttcccaagaagaaaggaactgattttgccattttaatcttttttttttttttttttttgagacagagtccgctctgtcgccaggctggagtgcagtggcatgatctcggatcaccacaacctctgcctcctgggttcaagcaattctcctgcctcagccttccaagtagctgggactacaggtgcacgctgccacgcccggctaatttttttttttttttagtagagacggggtttcaccatgttgcccsggctggtctcaaactcctgagctcaggcaaaccgcccgcctcagcctcccaaagtgctaggattacaggcatgagccacggcgcctggcctgccattttaatgttttacccgattaatagtgtttaaatatagtaaggaggtactttaaatacgatgttactgtttgccattgtcttgtggcttttgaaaatccccaaatttataaaactacctataaagtgtaccattgtcatatttgaattgcccatttccagtccccatgtgcattactgtatgatgaacgtgtacggacccacaaagctycattgagatacaggtgccaaatggtctactgggctattcagctagaagaactgcaaaaatcacaaactggtcttgtggacttaaagatcactcttgatgaatcattacatcttgctgaatcattacttcatgtgtgaaacgtgcaggttccaagggtctctgttgtcttcacagggtgcagtgaacttgcacatggaagaagaggttgaagacttcttattgaagaagcccattgtacctactgatggcaagcgtgtcattgttgtgtttcactgcgagttttcttctgagagaggtccccgcatgtgagtgctgcacggaactgggttctggggcacaggctccatgatgcttttgtgggacatggtggtttgtggcttgcacttggagcatattttagcatatcaagcaacctctggcacataacaagccattttcatatgtaattttatcctgaggtgaactttggctcttccagtctccccgactgtccttagtctgatctgtggggctactgttctcatgtgacctccttcaagtacaaagtgaccgttccttatgcaaatgccagaaaagtgtgaagttctcattctgtaaaacctcatatgatatgatgctttgaaacacttgatattattaccaatttcagggtgaaaagaaaaaagggggccaaagagctgcccatcagtcatctgtgtccattctaaaaggattgcaagcctgctgtttgtcaggcactgacaataaaaatgtaactacagtaaaacacagtacagtaaaaataccacagcgagcaggaccaacaaggaccctactgcagcagagatccaagtggggatccgtataaatgctaggaggacaggcagagaggtaggacagagagtgcagcttaactaggatggtccaagggagacttctgcaggaccacgttcttatgccacctttttattttgaaccaatttattttaaaaaacatttttaaattaaaaaatttcaattttttttttttgacggagttttgctcttgttgcccaggctggagtgcagtggcacaatctcttctcactgcaacctctgcctcccaggttcaagcagttctcctgcctcagcctcccaagtagctgggattacaggcatgcgccatcacgcccggctaattttgtatttttagtagaggcagggtttctacatgttggtcaggctggtcttgaactcccgaccttaggtgatccgcctgcctcagcctcccaaagtagtgggattacaggcgtgagccactgcacctggctttttctttctttctttctttcttttttttttttttttttgaggcagaggcacactgttttcacccagactggaatgcagtggcatgatctcggctcactgcaacctccacctcctgggttcaagcgattctcctgcctcagcctcctgagtagctgggataacaggcgtgcaccaccacacccggctaatttttgtatttgtagtagagatgggggtttcaccatgttggccgggctggtcttgaactcctgacctcaggtgatccacccgccttgacctcccaaagtgctgggattacaggtgtgagccaccacgcccagcagaaatttcaaattttgagatggggtcttaatatattggccaggttggtctcaaactcctggcctcaagcaatcctctctccttggcctccaaagtgctaggattgcaggcatgagccactgtgcccacccctttgaacctttttttttttttgagacggagtctcgctctgtcacccaggctggagtgcagtggcacaatctcgacttactgcaagctccgcctcctgggttcatgccattctcctgcctcagcctcccgagtagctgggactacaggtgcccaccatcacgcctggctaatttttttgtatttttagtagagacagggtttcaccattttagccaggatggtctccatctcctgaccttgcgatctgcccgtctcggcctcccaaagtgcttggattacaggcgtgagccactgcgcctgacctgaaccattttaaagctcaagaagaggtgaggttatggctgggcacagtggcacctgtaatcccaacactttgggaggccgaggcaggaggatcacttgctcgggagtttcagaccagaccaacctgggtaacacagtgggaccacacctctacaaaaaataggaggtgggaggatcgtttgagcccagcaggtcgaggctgtggtgagccatgatcatgccactgtactccagcctaggtgacagagtgagattctgtctctctctcacacacacacacacacacacacacacacacacaaaggttatacttgcacacacttcacctgattttattaatttttaacattttgtcacatttgtatgtacatgctctacacacaggcaactacagtacaacttgacacttttgactgtcatctcataagtccttcaaacatctgtctccaaaggatgctcattcatgaatggaattattcactcagcagtttttttgtttgtttgtttgagatgtagtcttgctctgccacccagactggagtgcagtggtgcgatctcggatcactgcaacctccacctcccgggttcaagcaattctcctgcctcaggctcccaagtagctgggactacgggtgcatgccaccatgccaagctaatgtttgtatttttagtagagacggggttttgctacattggccaggctggtctcgaactcctgacctcaagtgatctacccgcctcagcctcccaaagtgctgggattataggcctgaaacaaactaatctggacacacatacacacacatgtaaattgtttttaaacccacaaaagatgctgctctcttttttttttatttttgagtcagggtcagtctctgttgtccaggctggagtacagtggcaggagcacagctcactgtagcctctgcctcccaggctcaagtgattctcccacctcagcctcccaggaagctaggaccacaaacatgcatcaccatgcctggctaatttttgtattttttatagagacagggtctcactgtgttgcccaggctggtctcaaactcctgggctcaggcaatcctggcctcccaaagtgcttggattacaggtgtgagccgccatgcccagcccaaaagatgctattctcttaatctctcatttccccatcttcctctttaacacctctaatataaaggacattattataccatattgaaacttcacctagatatacagaaaacgccccatctctgtattctgtatttgcaagctgcatgtttatatcaccatctacagataccccttacacttcgttccccacttgagtttcgccatcactggctttctgttgttccactggggaaagatttgggattcacaggtgaactcttttttttttttttttttttttttgagttggaatctcgccctttcgcccaggctggaatgcagtggcacaatctcggctcactgcagcctcctcctcccgggttcaagcatttctctgcctcagcctcccaagtagctgggattacaggcacctgccaccacgcccagctaattttttgtagttttagtagacacagggtttcactatcttggccaggctggtctcgaactcctgacctcgtgatccaccgcctcagcctcccaaagtgctggaattacaggtgtgagccaccgcgcccagccaaactccttttaaccacaggcaaatggtttaagctacgtgctgcagaggaagctgctgcccatccctcatgagcagctaacaaaggccccaaaccactgagcttcaagagaaaatcagcagatactcttggctcttgtgtaccagatacctttctagatactgagggagaagagcagtgaacaaaacagaccaaaaaatctctgccttcatggaacttacatttcggagtggacaggagatcgagaccagcctggccaacatggtgaaatcccgtctctactaaaaatacaaaaattagccaggcgtggtggcggacacctgtaatcccagctactttggaggctgaggcaggagcatcccttgaacccaggaggcagaggttgcagtgagccgagatcgcgccagtgcactccagcctgggcgacagagtgagactccatctcaaaaaaaaaaaaaaaaggtgactgggtgcggtggctaactcctgtaatcccaacactttgggaggccaaggcaggtggatcacaaggtcaagaggtcgagaccatcctggccaacatggtgaagccccatctctactaaacatacaaaaatcagctgggcggtggcacgcgcctgtagtcccagctatttgggaggctgaggcaggagaattgcttgaacccgggagacggagattgcagtgagcctgaggtcacgcccttgcactccagcctggtgacagagtgagattctgtctcagaaaaaagaaggtgcttcagaggaaaataaggccagtggtggagctcccaggcaggctggaggaacagtagtggggctgcaggggctggcgtggggtgaacaaggggcagagcagcagtaggggcctgtagagctgtaggcctctgaaggacttggggcctcgggctttttcaccaagggcgaggcagtaagcagccattggctggatattgaagaccattcagtccaagtagaggatagaaacagggccccgaggcaggagcaagttcagcctctttaaaagccacagaaagaaacaagcccacttatgtagaaggaggtgagtgagggagcctggctgaagagaaggctggggtggagaaagcaaggggaagctggctcatatagtgaaaacttgccacaaactgtggtggtgaaggtgctgggcaggactcagatgctaggattgttggagaaaggaaaattggggaagagaccatctactggcactggctgtgagtgctgctcatgtggccaggaacttgcaactcagcactgattgtttctaagaataaatgtcaagttgggaagatgtgtataagggggacttagaccacaactgctgctttgactgcgttgccttgttgctgtgctggaaaagctaaccctgctttggccttccttcccctgactaggtgccggtatgtgagagagagagatcgcctgggtaatgaataccccaaactccactaccctgagctgtatgtcctgaaggggggatacaaggagttctttatgaaatgccaggtaagactggggttgtggagagcatctctcctcccctgcccccagtggtagactaatggatctgtctggtggtcatgactttctttccaggggtcgggggacaaggtgggtatctgctgaacccaaagaaagcccctgtagaactggctccctaggtctgcctggccgctttcagccttgtagccctaggcagagaggaaaccaggttgtgggtgtgaggcaggtgtaccctaaccttattctctcctgtcccctcagtcttactgtgagccccctagctaccggcccatgcaccacgaggactttaaagaagacctgaagaagttccgcaccaagagccggacctgggcaggggagaagagcaagagggagatgtacagtcgtctgaagaagctctgagggcggcaggaccagccagcagcagcccaagcttccctccatccccctttaccctctttsctgcagagaaacttaagcaaaggggacagctgtgtgacatttggagagggggcctgggacttccatgccttaaacctacctcccacactcccaaggttggagcccagggcatcttgctggctacgcctcttctgtccctgttagacgtcctccgtccatatcagaactgtgccacaatgcagttctgagcaccgtgtcaagctgcyctgagccacagtgggatgaaccagccggggccttatcgggctccagccatctcatgaggggagaggagacggaggggagtagagaagttacacagaaatgctgctggccaaatagcaaagacaacctgggaaggaaaggtctttgtgggataatccatatgtttaatttattcaacttcatcaatcactttattttatttttttttctaactcctggagacttattttactgcttcattaggttgaaatactgccattctaggtagggttttattatcccagggactacctcggcttttaatttaaaaaaaaaaaagaagtgggtaagaaaatgcaaacctgttataagttatcggacagaaagctaggtgctctgtcacccccaggaggcgctgtggtactggggctgctgctatttaagccaagaactgaggtcctggtgagagcgttggacccaggcttggctgcctgacataagctaaatctcccagacccaccactggctaccgatatctatttggtgggaggtgtggccctgttcttcctcaccccagttccatgacattggctggtataggagccacagtcaggaaagcacttgaggcagcatctgttgggccacccccggctcagtgctggaatgttgcagtgtaggtttcccagggaaggggggtgggggtaggtgggctccacaggatgggggaggagcatgtccactgagtatcttccttatgttgctgtgatattgatagcttttattttctaatttttaaaaaatggtcatattatgagtcaaagagtatcaaatcagtgttggatggaccacccaagggtgaggagaggggctggaagccctgggcattaggagaagggagtgggtgctggcatggacatgactggatagaattttctcaggagggagcttggtggattttgaaggtaaaactttctgggtttatcatgttttaattttagagacagggagtgatgaatcatcaccggttgtccccttatctaactccataaaagtgggaatttcaaaagaacacctcatccaaggagctggggcagacttcattgattctagagagacctgtttcagtgcctactcatccctgccctctggtgccagcctccttaccatcacggcttcactgaggtgtaggtgggtttttcttaaacaggagacagtctctcccctcttacctcaacttcttggggtgggaatcagtgatactggagatggctagttgctgtgttacgggtttgagttacatttggctataaaacaatcttgttgggaaaaatgtgggggagaggacttcttcctacacgcgcattgagacagattccaactggttaatgatattgtttgtaagaaagagattctgttggttgactgcctaaagagaaaggtgggatggccttcagattataccagcttagctagcattactaaccaactgttggaagctctgaaaataaaagatcttgaacccatgctctctgcctagttcttgatggatttaaggagaattacatttccctttaaggtcctgggaccacattaactaaaattagtgtttgggatggccacatttcctcaagaagctctgactccaaaaacttgtggttcagattgatttgcaagatgaaatgggtgcataaaaagtgtgcctgaggccagccgcagtggctcatgcttgtaatccccgcattttgggaggccgaggcaggcagatcacttgaggccaggaggtcaaggctgcagtgcccacacataatgtgatgctgggggctactggggacaaaatatattgggctgaagcacagagggacgcccagaatagaaaacacatggtcctttaggtatgggttggaaaaccaggggttcaggcatatttgattatattatatatacatatatttttctgagacagtctcactgttgcccaggctggagttgcagtggtgtgatctcggcttactccagcttcgaccttccaggctcaagcaatcctcccacctcagcctcccaaagtgctgggattacagatgtgagccaccatgctttttaaagtttactttgagcaagtaatatttccctggattgctgcaaaggtcagctggcttcctgtctgatctatccttcctaaaattgcaaattaagtcaacccattattgagaatttaattttttttttttttttgcctgtaaaatgaaacgacctctttagcccgtatgctaagatgcaacctcatccttagcctctgctcattttatgcttcactgagaggtcaggattctgtttctagaatgcccctgctctctgaaacttgcttgttagagcttgaagcctgccatgcagaaagtttgcatttactatagaaaaatttatgtgtggacacccacaaggtcaagagttggttaactcaaaaccatgggcaaaacttaactcactttaaattttggggaaaactattccatccaaggtgtgatctgattcagattttaaaaatttaaagtatgcaaagatgtacaaaaaatcaacactcatatttcacacaccagcttaagaatgaacagcttagctgaagccccttgcctaccctgacttcatcataaactcttcagctgcacccaacccccataaaggtaacacttatccttccctggtatgactatttcctaagcaagaagatagattcagattttttttccttttttttttttttttttgacatggagtttcactcttattgcccaggctagagtgcaatggtgcaatctcggctcaccacaatctccgcctcctgggttcaagtgattctcctgcctcagcctcccgagtagctgggattacaggcatgtgccaccacacccagctaattttatatttttagtagagacggggtttctccatgttggtcaggctggtcttgaactcctgacctcaggtgatccccctgccttggcctcccaaagtgctaggattacaggtgtaagccactgcgccaggcctcatgttttcaaactttacaaattgtgcacctataatcccagctacttgggaggctaaggcatgaggattgcttgagcccaggagttcaaaacctgcctgggcaatatagtgagaccccatctctaaaacaaaacaatctccattatgtgctcattcatccgtgactcactttgatttttatttctctgcttatcacacttaagggcacttggctccaagaagggcaaagcatgaatcaatagtgactcaggctacatctctccagcagagaaacctggagtaagtcacttctccctctggggcctttcttcacaaataacaaatgcatttgaactagattttccggccaggtgcagtggctcatggctgtaatgcctgcactttgggaggctaaggtgggtggatagtttgagcccagcagttcttgaccagcctgagcaacatgccaaaaccctgtaactactaaaaatacgaaaaattagccaggtatggtggtgcatgcctattgtcccagatactcaggaggctgaggtgggaggattacccaagcccagggaagtcaaggctgcagtgagccaagattgttccactgcaccccagcctgggtgacaggagtgagaccctgtctcaaaaaaaaaaaaaattaaaaaaaaaaagaattagataagtagatgttctctgtgactgcccctgtcccaacataccgtggctctggcatttggatggcccctttgcatatggcccctttgcaatacccacttcaaatctacttggaagggcctctatggaggaaaagctgtttctctcattcaataaacgtttgacttgtgctgagcactgaggataaggaagtgtgtaagatgcaggctttgtctcaaggcgttcactggctagtgggagaaatagtcactaaaaatgacgaggtcttaggtgtaacgtttccatgtaacagaagctaggatagagaggggtccagaggacatggggctccagagcaagcagtggaccccataggaggcgatgttcaaatctaaccttcagcaggagtctcacgagacagggtgttccaggaaaaagaaattgtgttcaaaggggaaataccatgcattcatacctgtgaacaaggtaggagaggtttgtggtgggcgggggggggggaccctgaacgccattctgaggagtctgtaagcctagggatctatgagagcaggacttctcaaacacgtgggaaacttgttaaaacgcagattctgattccacagctctgggtcgcagcctgaggttctgcatttttaacagactctcaaagctgctgatccttttgctaccctttgagcagccagcctgtagagggtttaagaagggagcagtgtgaagccgtgtaattgctgagagcaagacaaaggatggatgataggtaaggaatgatgataattatagtcatagcagaagctggggcatgggagggaagggctttaggtgctgggatctggtgatggatgggtagatgggagtgagggagagggatggattcaggatggtctcttggctcctgacctgagggagtggctggaccactggtactcagagcaagaaatcaagaaatacatggccaggcacggtggctcatgcctgtaatcccaacactttgggaggccgaggcaagtggatcacctgaggtcaggagttcaagactagcctgaccaacattgtgaaaccccgtctctactaaatacaaaaaattagctgggtgtggtggtgcatacctgtaatcccagctacttgggaggctgaggcaggagaattgcttgaacctgggaggcggaggttgcagtgaactgagaatgcgccgttgcactccagcctgggcaacaagagtgaaactctgtctcaaaaaaaaagaaatacacaaggaaaggaaatattgaaaaagcctaagttgaaatttataaaattactggcctgcatattttataaatatcagtgtcatacatgaccaaagagaggcccaggaaccgttccagattaaaggagactcaagagacatgacaactaaatgaaatgtgtgatcttggatgggatcctggaccaaaccgaaaaagagtactataaaggacatttttggaacatttgactacattgaaatatgaactttaggtaaaattattattattattattattttgagacacagactcgctctgttggccaggctggactgcagtggcacgatcttggctcactgcaacctccgcctcctgtgctcaagccattctcctccctcagccccctgagtagctgggactacaggtacccgccaccacacccagctaatttttgtatttttagtagagatgggggtttcaccatcttggtcaggctggtctcgaactcctgacctcgtgatccacccacctcggcctcccaaagtgctgggattacaggcatgagctactgtgacccaccaggtaaaattagtaactcagtgttaagtttcctgaatttgataattatactgcagttatgtatgagaacatccttgttctaaggaaataatacactgaaatattacaggttaagtgtgtgtgtgtgtgtgtgtgtgtgtaagagagagaagtagacagagtcaaagggaagaaagcaaatgcagcaaaatttgaaaacgttaaaatgtatgactcttgacaaagggcataagggaattctttgtactattcttgcaacttttctgtaagctttaaattatttcaaaagaaaacattttaaaaaggggctgggccgggtgcagtggctcatgcctgtaatcccagcactttgggaggccagcgtgggtggatcacttgaggccacgagtttgagaccagcctgggcaacatagaaagacgtcttctctataaaaataaaaattgaaataagtaaattaaataaaaaagaggggctgtcatgctgagctcctatgtggacggggggatctgggcagtgactgtcccgatgcctgagtggtcaagtgttgaatgtgaggagtgctccagagaaatatccaggctggtgacagcaagttgtcacacgtatccaagtggcagttctaccaatgtagaagacagggaagcagagagagaggttagaggcaggatgccaggaagccaggcagggaggggtagggagcagccacaaggaggtctcagtgatagggttaagctcggctgcctgtggtgggacatatgtcactggtgaccttgggacacaaagcctgcccacgctagggtagggtaggggaaggacagggaggcgaggcagaaacagcagcaggggaagactgggtggcattgggcatggcattgggcgtgctcagcctctgtgtgactgtgacctggcagctgggatgggggtggattacctagatgattctaagaccttaagatcttggtcattctgatttctaagcaatgactcctggaagttgtgcaaagcccagtccagagttcctgcttgcacactcccagaacagaggaggcagagtcccttccagtgctggccagagcaggacagctcttccgcaggcaaagtcaaatccgcacctccatactgtggctactttgtatatgttgattcattttccatttatgttttctgtttagtttttcaatatggatgtctttcttcaatatgaagtatttcagacatacccactgtctgggagtacccaccgtcaagggtaaataaaaacttccaccgataggctttctttgccctcttgtttcactctgctgccaggctgccacggggcttggggctgtgaccactgcaatggccataggaagacatcaggtggcagtggtggcccaggtttgtctcctcaggtatctcggccttctagctcctctcctccagagccagtcagtaactgggaggagctgggggctctccaggagcttcccaccccttcccctgccctggcttccagctgcatttaatggcactttgcctgctctgagtacaggaaaagctgtggctgttccttgtccaagctgcagttcccaatggcctagttgaagcatgtgtttcatgcaccacagtgcaagggctcccaaaggggaaaaaagggaagagggctggtttggattattagcattttgtatttttaataaatgcatcaatgtggtcatcatggaaaaatgtccgatctttgtggggtttatttacacttccttcctagtttactttgggtgacgcagggtggatcataggccttaaccttctaaagcacagcctctttcccctggcggcttcctagactctgatgaagaaataaggcctactttctgattccggtctgcccctgaccagtggtgtgacactgagcagaacacttcacttctctggaccagaggtctcaagtataaaggatgagcttgggcaacctccccatcctcccccaaggactcctcactattcctgttctttgggacctccttacc

SEQ ID NO: 94209 - DNA, 100408 bp, Homo sapiens
gtttgatatacccaccagataaaaactacatgtctatgcaaaataacaatatgtagtaaaaaccacagtaaaatcactttatggaaaaaagtattagaatgtatattctacaaggacaaggatctttatcttatccacggatgtatcctgaacacgtagaacagttcctggtatgtagctgacactcaataaatatttgttgaatgaagaagaaaaggaacttactgtgatgacagccttgctaagacagatggatcctctgcagccatactctgtttcatcttcagatttgtagtaactcagagcattatttttcaaaactacccaacgatcctgccacccatgaatgtagtttgtccactgggagtgggaaggggaagggaagagagaagaaaacaaaaaatagaagtattttagaaatccaaactttgtgaaacagcaatctaattttaaaaccaaaacgtgaaaagtccaacttaattctaagcataaacagtaaaatgattacaaaaagtgaaaagttgagattttctagattgcataatgattttcagtaatttttacaatattataaataaatctgtaagaaataaaatataacattttcttctaacatttgaagaataaaacgaaagccagattttggttaaaattattgtttattcttcgtatgctttcatcctctcctaagtaccttcatgatatttgttttggtccttgtcataattaacatattcaacagagaagtatgttcagttatgtatgtagtctctcattctgacaccaaagactgcatgaagccttctaaatcaacggaagtataaagtcaattattgctaaactctacttttgttgttattcctatatgaaaatttataacagctgtaactatatcaaaataaaaataataatctttagtaagctggcatcaactttaacttttcctctacagaactgaataatattaaaaatggccaatacattttccaagttcctctgaacatgcatttttcaaactcaagagtaataaaacaaaaataaaattgcttttcaaaaacatattggattgtcttcaataccttaagagtttctgtgttgctaaagtcttgctgcaaagtgaagatcacaataaactggaaaaggcagaaatgtaacctttacaggaatacttatttttgcatgtttttatctatgctctggggtgttaagtatagaaaaatctcaaaaactatctgccaattccaaaaactaattaaaaatggattgccaaaatatactgcattggctcaggctctatatccactgagaaatcttttatttttctgttctctaattaagcatttttgagattgattcacttcttaaattttcttttatttagtattttcttgagacagggtctcgctctgtcacccaggatggagtgcagtggcaccatctcagtttaccgcaatctcctgggctcaatcctcccacctcagcctcccaagtgattgagactacaggtgtgcacccccacatctggctaattttttgtagaaatgaggtttcgctatggtgccaaggctcgtctcaaactcctgggctcaagcgatctgtcttccttggtctcccaaagtgctgggactacaggtgagccaccatccctagccagttcttaatttttctaagccccatcattacaaccactctctgagaactcacccaagccaacatttaactcattctagtggctcccaatcaccatttccttatttctaactgcttgagatgtaccaccacttagacacgggcttgaaataaatgatagttaccaataaaactgaattcaccttcctataaagtatacttccttcctattttcctacttccttggggagactgctacttctgctcagagttagtgtattagatatacaaacagattagtggatataggataaaataggctcaactattttataactcatgtgaagagagttttgacaagttacttttgtaaacttcagtttctttgcctgttgactgacggctgaataaaataatgaaaatgcctagcatagtcacagaagatactcaatacctaagtgttccttctcaatatttatagcccattaccaaaagctgctcatctttccttcatagtaaacccttaaatttgcctcctcttctcattttcaactattccaatcaaattatccagttcctgtattccttaggagacttaataattttttctctagtatcttctgtttttttcataatttacacaagcttatttacttactaagcatatttgcctacttttcttacattgatcgtattgagtctctagctccaaaacttacatggacaacttcccactgactgtcatacaaattgtttagggcattcaagacccttcatggattaatcctacctcatttacaattaccacacttcataaggctaaactttgtgacagtggtcaagttacttattctctttgtgttctttttttctttgtcaaattctcttagagttaagtttaaacaagaatagacttagaacagtgcctggacatagtattttctgaatctgaggaagagttatacatagctaatgaagcttaaccttcagcatttctcactagaatagaactctttcaatgttagaggagaagccccagcaattatgtatccataacttaatattagttcttataagagactgaacaaactgtatcagcttcaggaccctttactcagtaagtattagctgtatcatgacacctggaagacaagttttttgtcttttctctgctctcataatgttccctcactcttccccatttaacaaatacagataaggcaatatgctagacactgcaggggaatcaaatattactgtggccaacaggccagcagacacaaactcaagagaaaaaaatatatatttagaataagagtcagaagcaagctacaaacaaaatgctatgggaattcaagtgaaggaggtcttgaatgatggcaaaataagaaaaggctttatggaaaggacagtatttggcttggactcttaaggatggacagaatttcaaacagtttggtgtgtggaaaaacagaaggtaaaccatgaaggatggaggaaattcagaaattgaatgagattattttatccaggcttaggtgctctcaagtcctactaaggcatgcatcttttccccaccatgatccatcacgatacttgctataactagatagaattattgtctatctagtatttttggaatctatacacttaagtgatttataagaaatatgcttcataggtatttccatgtatttcagattaccatatggaaaataccctttgaactggtatatttctaatataaatttacccaagcccattccaaatccaccccattttgggggagaaacaaaatgaattgtaccgggacttatttacattactcaatggaaggaaaagaacaaaatccgagttctgacctttgtttaaattaccaggtgaatacaaagaattcaaactatataatttacatttaaaaacatctaccatactcagtatgagtatatatactcaatttagaatacccttgattaaaaagcttccagaaaactgtatataaccataaattggtaaatctcaggaaaatttccttcatagctttgagcaagaataccaaaagctttattcctattcattctacatatgcagcaacagtcaaaatttaagctattcaccttccatagaggtgatcaaatacatttgtatgcatttaaatatcgagattggtcttccatttttttatctatagtatacctactccagagcactggttactttttcccccggtcactccactcccccaacccccaaaaaagtaattatcagtaggtcaaaagtacaatttgtttcgtaaaatacttaacacatcacaatactaatatggcagtcagcttcccatcttatgagcagtgatgaaactaccaaaatcactgagaagcaagtaacccacttcctattaccaactgaaaatgtatacctactacacaatgtgttcaatagagattcctaaattacaggatacatttaatctaaagaaatcctgaggagcttctcgttactgaaaaccttgcactgaaatttcaagaatgatcacagcatcaatatacaacataattttgctgctatacaaataaaagtcaacacttgcaatccttagttctgactactcatgcctttcctggcccccttctcattagctttctagacattataaaagcctaatatgaaacaattccacaaataatgtccaagtgatttgccaaatatgaatactggaaacagggtgatttcttaatagccactggctgcacatgacatagtatcttatgaccagcttgttgagggactggcccagctccccctctccaagttaactgctagctccagccatgtctaaaaaagtttaacaggaagggagagagaagtcaaaaaggctacgtgaatcttcttacagcaaaaacttaaaaaaaaaatccccacaactatgtaatatcaagagatcatccacctgcagtcctataatgactgctttgctaaaattttgatacagggattttaaaaaatatataaaagataaaacatcttttccttaccctcgaccccttaccgcaaaaatattttattattaagtaatgctcttcctggactaaagatcagtctccattctcacatgttccaagttactatgaatatttcctgtacccatcatgtgccgattcaatatctctattctgaactaaggtacagggtgagggagaaagtcctccacattcatctgtctcactacatctaacctagcagaattcaacacctcaaatttcaacaccaagctgagtcgctccagcttctgtcgaaagagttgcgtccgcagtgccccccaacctactcggcttggcatcctcagagagaccaacctcttttaagaggtccgacttgaaccgctcccatgcccagtcgttcggacaccgctgaagcccaacccggattccttacacccgggacagctgccgccctaagtcccaagtcacggcgcgcatctggcctcccaaactggatctcaggtttatacaccctttccctggtcctcggctgcccccgacgagcccccgggcaacaaggacagtgcccctatatccccgcctcatccctagtcgctgcagcaacactcagcctcgcaccccggcacgttccgcgcctcccgccagccccaccccaccgcctcagcggattgcctcgctgcaggtgagtctggccaggggtcccttggcaccaggggttgctcaccttactgaggaccccgcagcgctccacaggcggcccagactccgtctctggatcctcctccgagcccgacgagttccagctctgattatccgacatggaggctcgacaaccgagcaggagaccggcccccgctccctcagctgcgccggaggaggcgcccagtcctcggggtgaagggtygggggatggcgaagcgaagagtgcccgctccggtgtgggggggagcaggaggagggacgaagtccgcccgccgcgccgccgccgcgcctgacaccgagcggagcgaggaaggaggacgagcggtgaaggaagcctacccttccagccgtcagccgccgccgccgtcgccgtgacccctgcgttgcgcccggcgctgccacccgaacttagccccctcgatgccaatttcaaatagggaaggaaaagggaaaagaagggaagagaaaatccggccgctgagtcccgcgtccactcacacctccgctaccgccgccatcttcctgcctggcccactatttaccctcccctcccctgtcctttcccctccccttcgtcctcccattctcccccactactccccgccccgtccccctcccggcgtctgacgcgacacgccgagccttcgggatcctcctcccgaaccctacctccggctctcccgggtgacgacgggtagaaaagcaggaggagcggagaaaggagagggcggggtagggatgcagctgtgctgcattctgggaagggcgttggtccgtcgctcgcgcagcctcctgggagttgtagtcgcgatcctgaggtaacgggtgagtatcccgcgcggggatcgcttgtccccttggggccttgtcagtcggtgggtgggcttcgtttgacagttgcgtgaccagcccctcggcctcgcttctatccttgccttgtgtgtttatgacgaaccctccgggcttgcgggcccagacgtgagagagctttccgctgaagatgacgggcctgctttccagggcggcttgtcgaaagcccgggagcatctggccgcttccgcctcaaccatgggctggggttttgtgagctactagtgccaagggttttctttccaccagaccaccgctgtaaatctcgagggtcttactcattagaagttagaattcacatttgacgtttaaaggaagaatttccttagtaccttctcacaagcacgcacttcgcatttttagatttctagagtttgctttgtagaaagtaattttgaggttgtcagagaataaatgacgttagaaaggtttttaaagtaaaacaagaatgtkagatgatagcctgggattttctcttggttgtaaatgaatatcttactgagaaccacgttaaccatgcctgcccctcaaagataggaaaggttggatatatagaaactttctcgtattagaaataccgaagtgcagtggttttgtgtgtacaagggattaggcaataggaggctatttttgttttaagactagggttgaattagcagaaagaccaatagaagatctaacaactcttgtcagttgtcaaggataactttgattatgagactttgactttgtagcttcagtaatttcctctcgttagctattttaatatagtcgatttccttgtaattgccaagagtaaaatttgttattaaaccttagaaagagtactttcttactacaaggatgggacgataggagcgaaatttcgagtctaagggaaaacgctggccgagtgtggtggctcacgcctgtaatcccagcacttcgggaggccgaggtgggtggatcacctgaggccgggagtttgagaccagcctgggcaacaaggtaaaaccccgtctctactaaaaatacaaagattagccgagcatggtggtaggtgcctgtaactccagctctttatatcctggtttcaaatctaggcttgatgaccttctcccatatcccagtatcatatttttttcttcctgcatgggggattaattacgattctgaatggttggtagcatgaagctaggttatccctatcgtggcaatggatatttaagtaggcattgccaatatttatcttgctttcttttactttcttctttttctgaccatccacactccatttatattgatgagttcttttactaatatcaattattattatattatgctcatactgccatgtcttattctgcagctttgatccttaaggtgactttgcatatctgtctaggactcctttatctgttgatttttaccatttaagtctccaaagacagctgtatttttggaaaagtgggagggaagaggtagatggggatactcattgataccttaatgcacttcacagctgcttgagaatatgtcagatctcataaaaagttctaacattcgagaataagacagtgatttcagaaatggaatttcaaagggtgtgtaggccaccctttttatcctgtttcctattgtagaaatgagagccaggctaggaatgtttcaagcagaaatattcttactattcaatgaaattgaaaatgtattcccatatcttttactcctatctgtttggtttatgggataaaaacttgttagagtagttggtatttcataggcttcactataacattggaaaatcttttagtctaaaaagcacacagtacggtacaccaatgaacagtattagtgcccactcttggcatgtacacatgttctttctgtcgtttttattttgcttagcttttgagtctcttcctgttactgtgagaaattcttttattaatattttaaaggcatactatataaagcagtgtggtggtatattaggtatcagtagaatcctcwtgatagttatttagtaaacgtgttttgcttcctgtttttttctaacctttttattgtttcacttctactataatttcacatccttttcttcttagtcaaataagttgaaaaaatatatttttatagaacatgttgctatggtgatagtttatgaaaatatactttatccctgtttaagatctttattaagatcttgctatatgataatctgactggggtgctataaaagtaagatataaaccacttcttctgtagattcattgttttctagcatttttctgtctaggtattctgacaataattatgtgtagagagtgaataaatatttaaaattgtgtgtgacataggaggttttcagtaaataataactgatgaatgaaataagtttaacttggttgatgattgaagagaagttgtgggaactgcaattaacaaggcccaagaaaaaaatcactaacatgattaaaattggtcagacaccaaagaaccaaataacatcatagccttttgtaagtagcaattatcatttgccaaaggcctacaaaatgtcaaacattgttttaggttcatttgatttattcgctcttcacaaaaatcctgcaaggtagacattattcttactttacatatgaggaaattaacattcaaagaagttaattgcccagatcatcgctagtgaatagtctagtccagactttggaccttaggcgcttgcaatacataacttttaatacatatagaattgattttagattttagaaaagtcactcaggcataatggcacatatctgtagtcctagctgctcagggtgctgaggtggcaggctagcttgaccccagaggtttgaggctgtagtgagctgtgatcatgccagtgcactccagtgtaggtgacaaagtgagaccctgtctcaaaaaaaaaaaaattccaaaaaactattatcccaaattttttaaatgattaaacatttgagaatctgtcagagccagatagattacattctaggtgtgttacatagtttttctttagtttaacagttttcttaaaagaaaattcatccacatgcatttttaaggtgcagtaacatatagccagtttacagctcttttcttgctagtgtacactagcaaatatatgttccaattacgcataaataatttaaatgatctctggagcctcttgcaactatccccttgtcttgtgttgctactaaaaggaaaaacgtattgatttaacctttggtattatcaggaaaaatagtcattgtcatttactatcattttattttttgtatttttggtcattttatgaatagtcctgagaagcagcaataaagggatagtggaaaaacaactttattagaaattataataaaaataaaaacatagcaaacccaaatttttattccatatattcttgaaatagggaggcctcaagcaatcctcctgccttggcctcccaaagtgttgagatttgatgtgagccaacatgccaggcccaatattctttttttatggctaaattccattgtgtatatagaccacatcttctttatccattcatccattgatggttgattccatattttagctattgtgaatagtgctgtaataaacgtgtgagtgcagatatctcttcaatgtattgatttcccttttggatatatacgtagtagtagaattgctagatcatacagtagttgtattttaagttttctgaggaacctccatactgtattccatagtgactgtactaatttacattcccaccaacagtgtagcagggttcccctttctccacatccttgccaccatccattattctctatctttttaataaaagccattttaggccgcccatggtgactgaggtgagaggatcacttgagctgctcaggagtttaaaactagcgtgggcaacgtagtgagacctcgtctctagtataataaaaaaaattttttttaagccattttgactggggtaagatgatagctcattgtggttttgatttgcatttctatgatgattagtgatgttgaacatttttttaatttacctgttggccattagtatgccttattttgagaaatgtctattcttttgcccatttttaaataagattatttttcttttattgagttgtttgagctccttatatattctggttactaatcccttgtcagatggatagtttgcagacattttctcctgttctgtgggttgtcccttcactttgttgattgttcactcagctgtgaagaagctttttagcttgatataatctaatttgtctacgtttgctttggttgtcagtgcttttgtggtcttacacagaaaagtttttggccaggccaagagttgtgcctcatgcctataatcccagcactttgggaggctgaggcagaggattgcttgaccccaggagtttcagaccagtctgggcaacatagggagaccctacttttgcaaaaagaattttaaaagtttaaaaattaaaataaaattaaagaaaaaagtttaaaacattaaaagtttaaaaataaagttaaatgaataaataaaattagctggatgtggtagcacacacctgtgatcccagctactcaggagcctgaggtgggaggattgcttgagctcaggaggtcaagggtatagaaagctgtgattacaccactgcattcaaagccaggtaacagagtgagaccctgtctccaaaaacaaaaaaacaaaataaaacaacttttggccaggccaatgtcctggagtatttcccaaatacatttttctagtagtttcataatttcagatcttacatttaagtttctaatccattttgatttgatttttgtatcaaaaatcaaagagataaggaagaaatatctgagagatagtcttattcttctgcatgtggttatccagttttcccagcaccatttattgaagagactatccttttaccatgatgtgttcttgattgctttgtcaaaaattacttggttgtaaatgtgtggatttatatctgggttctctattctgttccatttgtccatgtgtctattttcttgccagtattatggtcatttggttactatagctttgtagtatattttgaagtcagatagtgtgatgccccaagctttgttcttttcccctaggactgctttggctattcagagtctttttgtggttctatatacgttttaggattctttttctatttctgtgaagaatgtcactggtattttgatagagattgcattgaatctgaaaattgttttgggtagtattgtcgttttaacaatattcttctaattccacaagcttagaatatctttccttttatttgtgtcttcaattttcttcatcagtgttttatagttttcttttacagatctttcacttaagataattgcttggtattttatattatttgtaactattgtaaatgttatgctctaacagcaaacaacatgaaaaataaatcaagaaagcaatctaaataaaaaaaagtctgtactgacttttgtatgttaattttgtatcctgacactttactgaatttgtttatcagttcttaacagcttttggtggagtctttaggggttttgtaaatataagattatgttgcctacaaagataacttgactccttcctttgcaatttagatgccctttatttctttctcttgtctgattgctgtgaccagggctttcagtattatattagataacagtggtgaaggtgggcatccttgtcttgttccagatcttagaggaaaggctttcaatatttcaccattcagtgtgatgttagctgtggttttatcacatgtggcctttattatttgggaacatgttcctgctgtatccagtttgctgagggtttttatcataaagagatgttgaatttgtcaaatactttttcagcatctattgaaatggtcatatgtttttggttcttgattctgttaatgtgatgtatcatgtttattgatttgaatatgttgaactatccttgcgtcccttggatgaatcccacttgatcatgatgaaggatcttattaatgtgatttgctagtattttgttgagaatttttgcatctgtattcatcagtaatattggcctgtagttttcttttttgttgtgtccttatttggttttgatatcaaggtaatgctggccttgtagaatgagtttggaagtattccctctttaattttttgttttgttttgttttggaagagtttgagtagaagtgagaattagttattcttgaaatgttgggtagaattcagcagtgaagccatcaggttccaggcttttctttgatgaaagactttttattgcagcttccatcttattacttactggtctgttcaggttttcagtttattcatgtttcaatcttggtaggttgtaagtgtccaggaatttattaatttcttctagctattccaatttgttggcgtatagttgctcataatagtatataatgattctttgtatttctgtggtctcagttggtatgtctactttttcatttctgtttttatttatttgaattttctttcttttatttgtctaaagttttgtcaatttcatctatctttttgaaaaaacaacttttgttgacctgtatttttttagtctcaattttatttactgctgttcttatcttcattatttattttcttctactaatgttgggtttggattgttcctgcttttctagtttttgagatgcattgttaggttatttatttgaaatctttctccttttttgatgtagacaattattattgtaaacttctctcttggtactgctacttttgctttatcccatagattttggtattttgtgtttccattgtcatttgattcagaatatttttaaattcccttcttaaatagagacagcgtctcactttgtcacctaggttggagtgcagtggtgtgatcatgacccactgcatcctcaatctccttggttcaggtgatgctcctgcctcagcctcctgagtagctaggacaataggcataacaccaccaagcccagccagcccaggtattgttgtgctgcccaggctggcctcaaactcttggcttcaaacagtccttccaccttgacctctcaaagtgctgggatgataggcatgagccaccatgccctgccaggaacaagtcatttgatttgaacttactccaaattaaatcaaacaattaattaattttttgtattgtttcccaggttcctcttgttaatgatttcaagttttattccattgtggttacaaaagatatgtgatatgatttctacttaattgactttttgagacttgttttgtggcctaagatgtggtctgttctggagaatgtttcatatgctgatgaaaagattgtctgttctgcagcagttgggtgaaatattctataatgtcaattaggcctatttggtctagtttaactcccctgtttctttgttgattttctgtctgtatgatttgtcctttcctgagagtagggtgttgaagtctcctactattattatattgcactctatctctccctttatgtctatcaatatttgctttatagacttgggtattctggtattggatgcttagatattaattgttatatccttttgctgaattgacctgtttatcataatatagtgaccttcttgctcactttttggagtctttgacttatagtcgtattttatctgatatgttagctactcctgctcttttctggtttccccttgcatggaatacctttttccagcccttcacttagagtgttatgtgtgtctgtgtaggtgaagtggatttcttgtgggaattgtatggtttggtcttgtttctttatccagtcatctactctgtgtcttctaattggagacttgagttcatttacattcagtgttattattggtaagtaagaacttattattgccattttattgcatgttttgtggttgttttgtactcctctcttttcctttctgtgttcttttgtggttaagtgattttctctgatagtatgttttaattaattgctgtttatttttagtgtatctattataggtttttgcactgtggttaccgtgaggtttattaaaaagttttagagctatgacaagttattttaaaacaatgacaacttatcttagatagcaaagaaaaaaatagaaactaacaaagaaatttaaaaacttctacactttaactctatcacccctaaaattttgactttttattgtctcaacttacatatttttatattgcctgtctcttaacaggttgctgtagctacgattgtttttaacaagtttgtcttttagacttcatactagaattatgggaggaccaaaaacaattatagtattagagcatcctgggtttgtctatgtacttacctttaccagaggattttatttattttatttttgttttcagagacagggtcttgccttgtcaccgaggttggagtgcagtggcataatcatagctcactgtagtctcgaactcctgggctcaaatgattctcccaccttagcctcccaagtatctgggactacaggcatttgccaccatgctcaggtaattagaaaaaaaattttttttagagataaggtcttatgatgttgcccaggatagtcttaaactcctggcctcaggcagtcctcctgacttagctttccaagtagctagtattacaggcatgaaccacagtgcctgtaatagactagcaatgagttttatacctttaaatgttttctttttgcacattttttttctctgagattgaagaactccctttagtgtttcttgtaaaatgagtctggtgatggtgaattttctcagtgcttgtttgtctgggaaagactttatctttccttttttgtagttgaaggatgggtttgctgaatataatattcttcaatggcagttgtttctttcagcactttgaaaatgtcatcccactctctcctggcttatttggttcccattgtggagtctgttgccaaacaaattgaagctcctttatatgttatttgcttttttttaacttgctactgttaagagcctctctttgtccttgacatttgagagtttgattattatatgccttggggtagttttatttaggtcaaatctgttcgtgttctctggcctgaatattgatatttttcttagattttgggaagctttatttttttgaataaactttctactcctgctcttgctcagctccttgaataccagtaattcttagatttagtcttttgaggtgattttctatatcttctaggcaatcttcattcctttttattattttttttcctcatctatgtgttttaaaatagcctgccttctagcttactgattgtttttttctgcttgatccactatgttgttgagagcctctaatgaattttttagttcagcaaacgtatttctcagttccaccaagatttgtttgattttttattgtttcaaactctgttaattttctctgatacatttctagattgattttttgtgttatttgggatgtcactgagtttccataaaatcactattttgtattcatggtccaagagctcacatrtcactctctcgttagggttagtcactggttccttgctttgtccatttgaggagataatggtttgctgttgtttcttttggatgtacatctatgtctttgcattgaaacattatttatttattttagtcttctctgactagtttggtttttattggacatgtttgcttagagattctttgtaacttacctgttgaatttctttttttttttctgctaggtcactctgcctcttttttggcactagatggaggcttaattccagctttgcctctgccctagtaaaggatcagagtgttgcctgttaggaattggggaggtcccaaaggtgatatctcagcagtgtagaaaggctggctaggggtttgtgcccaggggacctgtggaacgtacctcctacctagtggtcctgccgaacaagtactctgatttggtgtctcctttgactaagttaaagagcagagtttccaagactgggaatggtagtcctgccttccccatctgtctctgagtgtcctcagggctgtttctccctttgtgtactcatgatgcttcccatggattgggtcagggacaggtcttctgtcaggaccccaagatggtgggggaaactggttgtctacttcagtctcactttttccagtttagacactgtgagtcagggaaattttccacatacttggtgtcaggcaggttgtggggaggggtgtcatagatattgaattctgattctttttctgtctgcttggagtctttttcacttttttgtgtcccttggaaccatttgatctacatatttgagttctgggctattactagcaataatctcagcaccatatatttgtttttggttttctctagtgagggaatgaagccagcttacttctacttactattttggaacccaaaaccggtttcagaactcttaatggtgttaataaaagccactaaaaagaagactgcaaaaatgaggtttctatgcttttctgctttcaaagatgttatactgcggaaaacattttgaaagctgaagtatgatataaaaatgatttcttttcctactggatcatctttttaggtgattccattttatttttaaattattttatttttagcatatctcctaagaaataattcatgagtaatgattaaataaaccctaggatgatgcaatactaaaatacagagcataggaaaaacaggatccctaagattctattatgcatcttaaatttataaagaggatgaatacattcatatagtaattgtaggatagaatcagttttattctgttaaaaaaaaagaatccttttttctttggaagacttctaagaaaataagatataaaatattaatgtttacaaataaatttgctcaaagaagaaactcaaagataaaagacactggtggtatataatgactaatgtaactacgttcttcaattttattttacaaccaaagctgagctgatttatatttccttcccctgtctcagggttagctgytgtaattcattacaaaataagaataatttgcctaaataagatactctttatcttaaaggtcaaagcacatcataatatactgctagttgattyatctttgtccaatctagtaaaattttttgcayttaaaaatagaaaatattatatatgatgtatttagtaaacacctatccattgggatatctgaatgtcattttagttagaaatacctaaagtattaaaatcatttttcaggtttccacataagaaaggtatgtctgtcatgtagatcgcactgtagaaatcagttcatagtagaaccatactgtgtaaattgcaatctaagagaattatcaaggaccaaagtaaagtcaaggggatcaatgactaatatgcagtaatatttaccttagccctcaggcagatatgtgaaaagatgtgtaaagttaagaaatacctgtaaactccagatacaaaggctttctgcaaacaaagacctttgcttctttctaggaatttttgctggttttactgtggaatgagaacccaaactgttttgtgattaagttaaacaggtacatgattcaagcagtaggttttgtaggttatattcttgaaagaaggcctgggaatttttgaagccttggaaagccttgggtttttttgttggtttgtttttcacttgagagtgtttttaaactagaaaacaatttaaatatatgcgtgatgaggattctggggaggtgaggaaggcatctttgttgcatgtcagagacagataaaactttcacattgtaggctgggcaccatggcttacacctgtaatcccagcactttgcggggccgaggcaggcagatcacctgaggtcaggagttcaagaccagcctggccaacatggtgaaacctcgtctctactaaaaatgcaaaaattagccagatgtgctggcgggcacctgtaatcccagctactcaggaggctgaggcaggagaatcacttgaaaccgggaggcagaggttgcagtgagctgagattgcgccactgcactccagcctgggtgacgagtgagactccgtctcaaaaaaaaaaaacaacaaaaaaaaactttcagattgtaaaaagggcagataagaggaagcaggagtaggaggatgtgctcatagagaatatgagaacctgtttcatctctgtactttgaaggtaggggtggacagttcacagaataggtttaaatctaggaactgagtcagtcccaggtgccttccttaaatacttgtgggttgaatgactgtcttaacccatctgaaaccaatctaggattaaaattttagaagacagtggagtttaattggctgctctcctctcttaggctcttggagaagtcagtgctgtcagcaaacatctgtttaaacatgtggaatagctgtactttggagagcaaaagttattttagtactttaggaatatgaagtaaattacgtataagtttatttgcttttaaatttttgagaaacttctacttccagtatggagaagtaagctcttgcacatgactgaaaacctagaaaaaaaaaaacaaaaaaatcaattacttgtggggtctggaacaaaaaacagatagattttggagggtatcaaactttgacaaagcaacccttacagagtgagattctcattctttgcagctttgccttgagggcaggcacagtaaggcataactaatgttccagtacaaaaccccccattattctgtccaaaagaaccaggggaagggggccagtgctaccaaagagtagggaaggcacccaagaaaagagagagccagataatggaaattctaaatgctgtataatagcttcacctgactctctgacttgcatagtctacatgcatgcccacggcaaattgagagcaatctgaactgagatctgagtctctctccttaccagacatagagagttttcagttagaatttatttgcctgctaaaacaaaaatattaacactcttcagaaagataaaacagaatctagagttcttacaacatagcatttacagtatcgaggatataatctaaaattacttgatatatgagccagggaaatgtgaactattttcaaagaaaagacaagtcaacagatggtaaccccaagatgatccagatgttgaactatctgacaaagactttaacacaactattaaaactgtgcttaacgaagtaaagaaatatgtttgtatcattataaagaaaggaaatctcagcaaaaaaggaaaatataaaaaatcaaatggaaactgtagaactaagaaatacaatatctgaaatcaaaatgatgttactagatggacttaatagcaaaatggaaatgacagaggaattggtctgtcagttcgaagatagagcaatacaaaataaccaatatgaagaagagtaagggaaaaaattaaaaacaacaacaacaacagaaaaggaaagtcaggtacctgtggaacaacagcaaaggagtaataacaggagtaacaggtaattgaacctccaaagggagatgagagagattataggaagaggaagaaacaatagtaatagccacaactttctcaaaataggaaaacatacatagaggaacaacaatttgagtgatcatggccttagcagaaataatggagtctagaaaacaatggagcaacatctttaaagtactgaaagaaaaaagctgtcaattcaattctatatctgatgaagatatcttttgagaatgaagataaaataaaactggcatcttaggtgtagttgtgtatttggcatactgattaagaatgcgggctccggagacagaatctagatttgagtttcagcctgagtacctcttgtgatcatgggtgaattatataaattctctaacctcaatttccttatgtgttaaagacacttaaatgaaatatctaaactaatgagtagcaatgagaggatgcttcttaagcacttagtatctgcttggcatatggtaaattgttggaaaacattagttaccatttatatatgcatgtttttagctttcatagtaaatataaccaacctttatagaatttcgtattttatatttttatctgtttcatttttgttcaactgtagagaggttggctgtatcttgaaaagggaagagtgagactccgtctcttaaaaaaaagaaaaaagaaaagggaagaaaccactgacagtattgtaaaagagaaatcacttttactactgctttgacttcagcaaaaacaagatttaggaagctcttattttcagaaaaggaaatgagaggggaaatttttctctcttagaaaataaaaaamctcagcacctaattaataagatttttactatgtaaattaaactttatccaatcattctttgtcccatttggtacccttttgtttgttttgtttgtctccttatttctttttcaatatttttcatggtattttaagaggatgatttaaacagagataaacttctgatttaatgggttttttttttgkttttttttttttcttttttttttggagacagagtctcgctccgtcgcccaggctggagtgcagtggctcaatcttggctcactgcaacctccacctaccaggttcaattgattctcgtgccttagcctcctgagtagctgggattacagacgtgcaccaccacaaccggctaatttttgtatttttagtagagacgtattttgccatgttggccaggctggtctcgaactcctggcctcaagtaatccacctgcctcagcctaccaaagtgttggggatatgggcatgagccactgcacctggcctaatgtgaatattttaaaacctaaaaccatttattttcttttgaagtaaaaggtagaggtatctaaagtagataaagagagtcagctaggtatgtggagtttatctctcagtctgatttgagttttaatgttcataagcataaaccataagataccccttttgactttgtttctgcatttgatatgaatggtagtgaaagatattgtgtattaaatttggctttttatatataagtcattacataaaaaagtctccaaggagaatatgctttgttctattctcctctaaaaagaattatataatcaaactttttttttattctagttgttggaaatcttaagatgtagttttggcaaggtgcagtggttcacacccctaatctcagcactgtgggaggccaaggcaggaggattgcttcagcccaggagttctagagcagcctgggcaacatagaccctgtctctgcaaaaataaataaataaaacaaaattagctggttttggtggtgcacgcctgtggtcccagctacttgagaggctgcagtggaaggattgaatgactgtactccagcctgggtgacagagtgagaccctgtctcaaaaaaaaaaaaaatttatatatacacacacacacacacacacacacacacacacacacacaagtacgtgtgtgtatatatgtatatatacatgtgtatgtgtgtgtgtatatatatagttttattcttagatcaactgtttggactttactgttgacatacctgcttttcttctccgaacctggtagttttgctttcacttaaatttttaattctttttataaggtatctcaaaatctttttggaaagaaatagataaccaggcaggctgataggtaagaaggtaagaagaccacttgttaaagaattccatgtgttgcttttaaaatgtctgtcttattaagaccagtgcctaaaaatttataggcatagatattcatcacagcattttttataatagagaaaatttagaaacaacctaactgctgtcactagggagctgttatatgaaatatcgttcaaccatacagtgtaacactgcacagccattaaaaatgatattagaatattggtactctcagacaaagattttgaagcaagaagttaaaagttcagccatccccaagtggccgaactaaattcagatgcccagacacatcatgatggcatggaaaatttcccttcatacagttttaaataaagaaaacagactagaaaacaatatgtaggatgaaatctactatgtctaaaatatatagatgatacatttatactccatgtaagtaaaaaaatacggaagaaaaaatgattatatagttccataattatttaaataaaaataattccatgattaagaggggaagaaaaggttacaaagcagtatgaatagtgtgatgtcatttttgtataaaatatatgaagaaatagacatagaagaaagtaatgaagtatcccaaaatattatattaatgatcattctctctggatttgttgcatgatatatttattatctttgtttcccttttatgcattctgatataaaattttttgtagcaagcatgaacttttatcattggaataaacattgatgctatattaaaattagagtgtggtggagcatggtggctcatgtctataattccagcgctttgaaaggcctaggcaggaggaccacatgaggccaggagtttgagaccagtttgggcaacatagcaagaactccactctaccaaaaaaaaaaaaaaatttgggcaaggtggcacatacgtgtagtcctacctgctctggaggctgagtcagaaggatcacttaagcctagaagttcgaggttacagtgagctatgattgtgctgccgcactccaacctgggtgacaaagcaagatcctgtctcttaaacaaaaatagagagaatttaatgaaatagatgttataaaatgtaaagttttgtattttcatgacattaagtgaatacaattatcccttggtatccatgggggattggctcccagacctcccacagacaccaaartccacgattgctcaagtccctgatataaaatggcatagcatttacatataacctttatatagtattccatagactttaaatcatctgtagattccttagaatacctaattgtgttagtccatttgcattgctttaaaggaatatctgagactgggtaatttataaagaaaagagatttattttgactcatggttctgcaggctatataggaagcatggtgccagcatctgctcctggtgagggcctcaggaagcttccaatcatggtagaaggcaaaggggaggcaagcacattacatggagagagcaggagcaaaagagagaggggggaggtgccacactctttttaacaaccagatctcttgtgaactcagagcaagaactcacatattaccacaaggagggcactaagccattcatgagggtcataggtcatgacctacccccatgacccaaacacctcccactaggccccactccaacattggggatcacatttcaacatgagatttggagaggaacacacacataaaaaccatggatgcatggtttggatgctgtataagtaattgttatactgttacatagtatatgctatacaaatagttgtaaatgctgtataaatagttgttatactattgtttagagaataatgagaaggaaaattgtctgtacatgttcagtacagattttttaaaaaaattttttatatagagtgtgttgaatacacagatgtggaacccatggatatgaaaggccaagtacacagattataatcttgtaatatatatataaacatatcaaaatgtatactggagtatatagagatcttttagattgaaatagtataaaaaatacttaatacatttcacttgtataagtacatacatataattgaatataaacatgtacatatagrtgaaattgtacccttcatatccagtcttacattccaggagatacaatagaactatcagcacaaattttgcagtaaatcttagttgactcaaattcacatgaaatggctaacaacaacaaaaactttccttttttgaataatgctttccctttactttcccttttcctttaagtagaaatatagggccctttttacttgatagttgatttttcagtttttaggttaggtaatgtctggtgaaaagctgttttagatgctatgattattgaaggaattaccctttggattactgggaagatctccagttgatccaaaatgtatttttctttatgtttctcacatttcagggtattcaaaaagctgaatctatttgtatttcttttttttttttttttttttttgagatggaatcttgctttgtcacccaggctggagtgcattggcacgatctaggctcactgcaacctccacctcccaggttcaagcaattctcctgcctcagcctctttgtatttttttttccctttttcttttttttttttttttttttttttttgagttggaatctcactttgtcatccaggctggagtgcattggcatgatctaggctcactgtaacctccacctcccaggttcaagcgactctgtcagcctcagccttggataattgtattaccttatccaaggtacctactaaatacatacctcagtttcctcatctctgatgaatattatatcatgcatgtaaaatactataagagccaaatgttaacttttacaattattgtgtttgtaaaaacttaactgatatattgttattaattttatttttatctgtatattagtctgttcattcattaaacacacatttaataattaacaggtctaatggcctagcactgtagcagtttttgccctcttgaaatttttttcttttcttttctttttttttttttttgagttggagtctcgctctgttgcccatgctggagtgccgtggcgcgatgtccgcttgctgcaagctgcctcccaggttcatgccgttctcctgccttagccttgcgagtagctgggactacaggtgcctgccaccatgcccggctaattttttgtatttttttagtagagacggagtttcaccgtgttagccaggatggtctcgatctcctgacctcgtgatcctcctgcctcggcctcccaaagtgctgggattacaggcgtgagccactgcacccaaacccctcttgaaatttatattttagttgaaatataactaaaatgaaaatgttttttttcctcgaacaggttctacgggaaaaagttttttggcatcaattattctgttgatcagttcattactgtgctttaaattcttaccatcattcaaatgaaaacaatatatatagtatattgtttatatactatgtataaacaatatactatatatatttagtatatagtatatagctatttacaccagtatatagtatatagctatatagtatatagctaccagtatatagctatttacaccagtatataatatatagctatttacaccagtatatagctatttacaccagtgctacccaaaatgtgggctgtggaccagtgcttatccatatgagataattataaaacttgaggctgggtgtggtggctcacgcctgtaatcccagaagtttgggagtccaaggcaggtggatcacgaggtcaggagttcaagaccagcctggccaagatggtgaaaccccgtctctactaaaaatacaaaaattagccaggcgtggtggtgggcacctgtaatcccagctacttgggaggccgaggcaaagaatagcttgaacctgggaggtggaggttgtagtgagctgagactgtgtcactacactccagcctgggtgacagagcaagactctgtctcaaaaaaaaaaataagaaagtaagctgtaaacttatctcatactttctgagggtcaaggatatgagcacagcgtagttaaatgtctctggctcatgaaggtccagtcaagttattatctagggcagtattcttatttgaagatttgactagaggaggatccacttctatggtcactcacatgacctcctcacagggctgtctcacatggcacctggcttccccagagttagtaatccaagagagaataagaacatctaagatggaagtcccattccattataaaccatttttgattttttgttttttaacttttattttaggttcaggggtacatgtacacatttattatataggtaaattgcatgccatggggtatggtgtacagattgtcacccaggtaataagcatagtacctgatatgtagtttttcaatcctctccctcctcccaccctccaccctcaagtaggctccagtgtctgttgttcccttctttgtgtactcaaagtttaactgccacttataaatgagaacatgcagtgtttggttttctgtttctatgttagtttgcttagtatgatgacctccagctccatccattttgcctcaaaggagatgatctcatcctttattatggctatatagtattcctttgtgtatatgtaccacttttttttttttaaatccagtctaccattaatggacatttaggttgattccatgcctttgctattgtgaatagcgctgcaatgaacaagcacatgcatgtgtcttttatggtagaacgatgtatattcctttggatatatacctagtaatggcattgccaggttgaatggtaattctgttttaagttctttgagaaattgccaaactgctttccacaatgcctgaactaatttacattcccaccagtagtgtatgagtgtttccttttcactacaactttgccagcatctgttattttttgattttttaaaaatcacaattctgactggtgggaggtgatatcattgtgattttgatttgcagttctctaatgataagtaatgttgagcattttttcatatgtttgttagccacgtgtatgtcttcttttgaaaagtatttgttcatgtttttgcccactttataatggggttattctttttttgctttaaaattttgtttcagttccttacagatgctggatattagacctttcttggatccgtagtttgcagaaattttctcccgttctgtaggttctttttattctgttgacagtttcttttgctgtgcagaacctctttagtttaattaggtcccacttgtcagtttttgtttttgttgtaattgcttttggcatattcatcatgaaatcttagccaaagcctatgtccagaatgttatttcctaggttatcttccagggtttttatggttttaggttttacatttaagtcttgaatccatcttgagttgatttttgtgtataatgtaataaaaggatctagtttcagtcttatggatgtggctaaccagttatctcagcaccatttattgaatagggagttctttctccattgcgtgtttttgttgattttgtcaaatatcaaatgattgtaggcatgtggttgtacttctcagttctctattctgttccatttgtctgtgtgtctgttttgtactgctaccrtgctgttttggttaccatatccttgtaatatagtttgaagtctggtaatgtgatgcctccagctttgttctttttgcttagggttaccttggctattcgagctcttttttggtttcataggaaatttaaaatagttttttctagttctaggtttgtgaagagtgtcctttgtagtttgatggaaatagcgctgaatctgtaatttgctttgggagcatgactattttaacaatgttgattcattctatccatgagcatggaatatttttccatttgtttgtgttatctctgatttctttgagcagtgttttttaattctcattgtagagctatttcacctccctttcaatacctagttagatattttattctttttgtggctattgggaatgggattgcattcctgatttggctgtcagcttggaggttgctggtgtacaggaatgctacagatttttgtacaatgattttgtatcctgaagctttgctgaggtttatcacatcaaggagcttttggagctgggcgtggtggctcatgcctataatcccagcactttgggaggccaaggcagatggatcacttgaggtcaggaattcaagaccagccttgccaacatgatgaaaccccatctctaytaaaaatacaaaaattagctgggcatggtggtgcatgcctgtagtcccagctactcaggaggctgaggcaggagaatcacttgaacctagaaggcagaggttgcagtgagctgagattgtgtcactgcattgcagcttggatgacagagcgagaccctgtcttaaaaaaaaaaaaaaaaagcttttgggctgagaccatgaggttttctaggtacagaattatattgtctgcaaacagggatagactgacttggattgggtttcgactgtctcctgtatgtcgatgatctttgttcctatccatattcagggatgatgagtttggttctttcatataatggcatttggtctattacctcctgtactgttttattgtaatccttagatttcttggattgggttctgtccaaatatgtttgttagtttgttgcctcaatgatatgtctaatattatcagtggggtgttacaatctcccaccattattgtgtggttatctaagtttcttcataggtctctaagaacttgatttatgaatcttgatttatgcactcctatgttgagtgcatatatatttagaaaagttaggtccttttgttgaattgagcccttaaccattatgtaatgtccctctttgtcttttttgatctttgtttatttaaagtctgttttgtctgaaattacaatagcaatccatgcttttttctgtattctgtttgctttgtagatttttcttcatccctttactttgagtctgtggatgtcattgcatgtgatatgggtctcctgaagacagcataccattggattttgcttctttatccaagttatcattctgtcttttaattggggtgtgcattcaaggttagtattgatgtgtgcggatttgatgctgtcatgttgttagtcggttattatgaagacttgtttgtgttgctgttttgtagtgtcactggtctgtgtagttaaatgtgcttttgtagtggccagtaacagtctttcctttccatagctagcacttccttcaggacctcagtaaggcaggtatagtggtaactaattcaattaccacttacttgtctgaaaaggatcttatttctccttcatttgtgaagcttggtttggctggatatggaattcttggttgaaaatttttttttaaagaatgctgaatataggtccccaatctcttctggctaataaggtttctgctgacaagtctgcttgttagcctaatggggctccctttgtaggtgccctccctcttctttctagctgcctttacattttttctttcagaccgtggagactctgatgactatgtgcctttgggatgatcttgtgcagtatttcacaggggttctctgcatttcctgaatttgaatgttggcctctctagcaaagttcatgacaatttcatggacaatatcctgaaatatgttttccaagttgcttactttctctctctctcttttagggatgcaaatgagtcatagatttggtctctttacataatcacattatttcttggaggttttgttcagtcttctttattgttttttctttatttttgtgtgactgggttatttcagagagctactcttcaagctctgagattctttccttaccttggtggattctgctgttaatacttgggattgcattttgaaactcttctgatgtgtttttcatctctatcagatgagtttggttctttcatataatggccatttggtctattacctcctgtactgttttattgtaatccttagatttcttgaattgggttttgactgtctcctatatgtcagtgatctttgttcctatccatattctggattctgtctctgacatttcagcctagttaagaaccattgcctgggaactagtgtggtcgtttggaggtaagaggacactctggctttttgagttgctagagttcttgtgctggttctttctcatttgtgtgggctcatattccttcagtttttgatgttgctgtcctttggatggatttttttgcttttctcttctttgatgcccttggggatttgattatggtataaggtggattcagttgatgaactttgattctagtctgttcctgggtcttggaggagcgctctctgattactttctctgtgcctacattttttggggggtgttctggtccacagggcttcctcagtcaggttcctcagttggcagagaggctgcattcttgcaacatcagccctaatctgctatctgtgtgcttcctggggaaacatgaggttgtgcctgcctgcagagttcaggtggaagtgggaaccctggattggaagttctcgtagatgtggcccatctggctacaagaggcagggtgggttgaattgcctgctctgccatctgggtgtttccatggcaacaggaggctgtacccccggcaaattcaggcagaagcaggaccactgggccagaagctctagcaggcatggctcacctggctaccagtggtgggggtgggtggaggcacccaccctgccccctgggtgtttgctgggacaatagtaggctgtgcctaccagctgagttgccatagaagcaggacccctgggccggaagctctagcatgtgttgccccccagctaccagaggcagggatgggcagggtgacatgctgtcttgtctgggtgtttactgggacaacaggaagctgagccctcctgctgagttcacacagatgtggagctgctgggctggaagctctcacaagcattgcttgcctggctaccagtgacgggggcgggtagggtcatgtagtttgctgtcccagcatttcttgggatgacagaaagctgcatccttcagctgagttcacacagaagcaggactgctgggctagaagctctagcaagcattgtctgcctggctacctgtggcaagggtagatggagtggccagccaaattctggctgaagcaggaccactgggctggaggctgttgctgagccycatccagcaaggagtagtggagaaatcttactgctttcaggcactgcagtggcggcctctattgaggctataacactggtgctgatctgctccggggcgcaaagcttgtagaggtgcccttgggcttcagaattgcctccaccaaacatctcagtggctctgcctcagtctagaagcatgggggtggggggcacagggtggtcagggggaatctcccattcccagtcttgcacaggtttctgtggaaagtgtgaatccccctgggggctctcactcaccgtttgcggtgttggttaggttctcctggctctgtgctcagcccagacaagctggtgcccaccttcattcctccgtgctctctgtgtttccctgctgccttgatagatctcaacgttgtttctcagatgatcagcttgcagggtcagtgttcagtagcccttttgcttattctctgtgagagcaatgcgcatgagctgcttctagtctgccatcttggcccccctaacctaacccatttttagatgttacattccatcacttctacttctgctataatctatttgttagaagcaggtcacttaattacacattatggcattagtttgttgtgccttttgtgcttttcctagcatctgtgaagtattattgaaagtattttagtagtgttaggaaatgtgtattttataataattattttagtagtgttagaaaatgtatattttatttgcagttcaaattttgttttttttatttttttatttttatttatttattttttttgagacggagtcttgctctgtcgcccaggttggagtgcactggcgcaatctcggctcactgcaagctctgcctcccgggttcatgccattctcctgcctcagccgcccgagtagctgggactacaggcacctgccaccacacctggctaattttttgtagttttagtagagacggggtttcaccatgttagccaggatggtctcgatctcctgaccttgtgatccacccgcctcggcctcccaaagtgctgagattacaggcttgagccaccaggcccagcctcaaattttattttttagtgtactttgtagtatagaaataagtacttcatatgctggaggtagctgttaacattttatgaattttcataatgctataccatgtgcacattttttaaagtcttcttaaaataaacagcatatttggatctcattaatttaaaaaagttaccagtaagtctggactgctttttcttttatgaaaaaaattaagctaacttaaaccacatattaagctaacataaaccacatattgtgatagtttgatgaactaatctagctcggtgttttgcaatgttttttaactcatgctttctttcataaaccttccattagtgttttttgaaacttcaaaaaaaataaatgttactaaatacaaaccaagttatagtatctcagaggagagagagatatcatctcatcaattttttttggcaggggtggtgggagctttctggtgaagaccggaaaacctgttagacaaattctgaaaaactgtaacattcatctcatcaattgagaataattatttttactaatttagtgtaaatcctagatgccgttgtttattatcagatgctttttatataatatgtgtttaagtggttttattttttttttatttatttatttttgagatggagttttgctcttgttgcctaggctggaatgtagcggcgcgacatcagctcactgcaacctccactttccaagttcaagcaattctcctgcctcagcctcctgagtagctgggattacaggcatgtgccaccatgcccagccaattttttgtatttttagtagagatgagatttcatcatgttggccaggctggtctcaaacttctgacctcaggtgatccacccgcctcagcttcccaaagtgcagggattacaggcatgagccaccgtgcccggccgtttaagtgtatttttatagcacagggttaataatagtttccaaatggactgtcagtattttaaaagtaaggctctttttaacattgtgctcttaaaagaataaaagattattaaggaaggtatgtgattatgtttctaaatcattttggcttaatcactccaagaccacaacttcttgctgcttttttttttttatcatgttttggcaagtcccgaagcagtatttttgggatgtttaatttttttgtttctggtatttaggcatgtatgatatgactaggaagaaaatagaataatgattttcagagctgatttgctatggaaaccatcttttaaaattcatcaatattaaacaactgttattgcggtctttgagttggtaacaatcgcaatgtatgttagtgttcacacaaatatttctttttctttcttttcttttttttgaaacagggtgtctctgtcacccagactggaatgcagtggcactatcatggtttactgcagcctagacctactaggcttcagagatactcccacttcagcctcccacgtttaattttttttttatagagacaggcgtcttactctcttgcccaggctggtctcaaacccctgggctcaagcaatcctcctgccttggctccccaaagggctgggattataggcataagccaccacaccctacttgcataaatatttctaaggaatttggagagtcaaataaatgaagtttactatgagctttcccctttttgtaggttacccatttattcttttaaattagtgatagaatacatatgaagaaattatagaagagctgtaaagtagcatcagtagaacagagatctaaggaaatatttgagatttttatctaaaatttcatttgaacagggttatgttgctaaggagttttaaacccctgccatacactattagagctgtaagaaaactaaaaagtcaggagcagtggatcaagaaacaatatcaaggttagaactcagaagaaacttaggagcagtttggcaaaggggacaattgaaaggatcatttttccaggacaggaaaataataatagcttatacaactctttttgattttattagatattttgcttccaatagtgtggagcgtagtgtgaagataaatagcacagtatctcaatttcttatttgtagtgtagccctatcctattatcctggcttctgttgtaatttttttttttttttaaagacacaggcttcatcaccctgtctcttaaaaactcttctctgttgtccaggctggagtgcagtggcataaccgtggctgactgcggcttcgaactcctgggcttaagcaatcctcctgcctcagcctcccgagtagctgggactacaggcacatgtcaacacacctggctatttttttgtgtagacagggtctcactatgttgcccaggctggtcttgagttcctaacctgaaatgatccttccatcttggcctcccaaagtgctgtaatcacaaccctgagccactgcccctggcctaattttatattaaaattgtaatattctagattgtagagcttaaaaaatacagtaccaaaaaaggtactacaggagaaatgttttctcgttttctaaggacattagtatgaactgtcccttaagacctgtgcattttactgaaacaaaattagtctgtttagcatcacttttatatagataggtatttttgccgacatctagtgcccaaagaaactcccagcctatctccttcatgttgattcagcattccaagaaacaatcaactcctataagataaaaacttagattttcacacttttgagtatgtttatttctgagttaaagttttcattgttaaagaacctggaaggctttttataaaatatgcaactcatcatccaaatagaaacttaaaaacttggaggctcggcgcagtggctcatgcctataatcccagcactttaggagacagaggcgggcagattacctgaggtcaggagtttgagatcagcctgaacaacatggagaaaccccgtctctacaaaaaatacaaaattagccaggcgtggtggtgcatgcctgtaatcccagctgcccagctactcgggaggctgaggcaggagaatcgcttgaacctgggaggcggaggttgccgtgagccgatatcgcaccattgcactccagcctgggcaacaagactgaaactctgtcttctgtctcaaaaaaaaaccaaaaaacaaaaacaaaaacttggggcttggggaattgacctttgaattgacactgtaggtaatatgtttatatcagaatattattcatcctgtcgaaagaagataatttccacttattgttctataagaatgaatttaatgtctttaggatgaagtagagtatagatttttaaatttccctctgtcccattcttcttcactagaaccaattaaatgaataaaaaaaggagaaaggcagtagaagagaatacatgcatggttctcacaaggcaggccttctgtctctggtaaaaaacttgagttttagtgtatatactcttggtttaggatctgtggaatttcattatttctgttctttctctcagtgacacatgtaaatgagaaaatcattcaaatccagtctaaaataatttttaaagttttttcctcttgttttgcaaaaatattaaaagctaaagctaaaaattcaaagttgcacctatactttcatttttgtcatacaaaaattgtggccatatggtttcrgtgtatgttttcatgtatctgtatgtaaaataattgaagaacatggaaaaataatctgttaaagtcttgaattgtgattttttattttcttgaaatttcaaaaagtatttttgcaataaatgaaaatgaaaaaggaaattttaaagtagatcatataagatgtattggtttgaaaattactactttaaatgtagagtaatatccctaattcaattcattgtatttaaatttatagagaataacgagcatttaatcacattctgaaattttgtgctgggtgctaaatctgttcaaagtattaaatatttgaatatttgggagattcaaaatagtatttgtccttaaagtatataaaggttttctgaggaaattattgcatttggttatttatagtatattagaaataggaaacaagctccacctaggaacttactgtagtttagcctttcgtattcatacttctctctctcttcccgccacctctctctccctcactctccctttcccccatcccctgtctcctccccttctctcttattacttttsgtatattttgcatattttctggtagattaattccaggtgactttgatcacagtgtggttttttatatagctttgtttacctcttataggtgggaggaggcctaccacactaaaactttttccttagaattctttcttaaaaattctaagtttccatctttattaccaccaaaaacaaaagtttgccttatatgtgtgggtatatatatgtgtgtgtgtgtatatacacatatacacatatatatacacatatatacacatatacatatatacacatatatatatacacatatatacatatatatacatatatgtatatatatgtattttttttttgaggcggagtcttactctgtcgcccaggctgcagtgcagtggcgtgatctcggctcactgcaacctggctcactgcaaccgccacctcccagtttcaagcaattctcctgcctcagcctcctgagtagctgggattacaggcatctgccaccgcgcccagctaatttttatatttttagtagagatggggtttcaccatattggccaggctggtctcgaacccctgacctcgtgatccacccacctcggcctcccaaagtgctgggattacaggtgtgagccaccgcgcccagcchtatttatttatttatttatttatttatttatttatttatttatttttgagacggagtcccattctgtctggcccaggctggagtgcagtggtgtagtcttggcccactgaagcctctgcctcccaggttcaagcgtttctcctgtctcagcctcctgagtagctgggactataggcatgtgccaccacacccagctaattttgtattttaagtagagagggtttcaccattttggccaggttggtctcaaactcctgatttcaggtgatccacccacctcggcctcccaaagtgctgggattgtaggcatgagtcactgctcccagctgtgccttatatttttaactagtaacctgaataaattcggggtgattttgaaagcagagctcacaggatttcctgatagtttggatgtgggtgtatgagaaagagaggggtcaacgatgactcctgggttatttgcatgagcaactggaatagattagagttgccctcaatggataccaggaaggccgtaaatggagctggttggaggggatggaggcagatgaaaagattacttttggacatgttaaacttgaaatggcaaacaggtattttgactggtgctataaacctgtaagtcattggcatgtagatgatagtcaacatatgcctatgaaactggacaaaagtttcatggtaattaggtatcaataagcaggaaggtagcaaaaaactaactttacctatctcacaattttgccttgtcccaggattgcccatagcccaattcttttgattcaagcaccaaaaccaactcttagagttttttgtttgtttgtttggtttggtttttttgagacaggttcttgctctcttgcccaggctggagtgcagtggcatgaccatggcctactgtagccttgacctcccaggctcaagtgaaactcccaactcagacttccaagtagcttggactacaggtgcgcatcactacacctggctaattttttacttttatttttgtagacatgagtctcactgtgttaccagggctggtgttgaactcctgggcttaaccaatcctcctgccttggcctcacaaagtgctaagattacagccatgagatgctgcacccggcctcttctcaagagttttttggctaagcaattaatatatgtgaagagtaggcattcaataatatgtcttttccttttatacatttcatcttttaaagggcaaggcagccaggagttgtggcatgtgccttcagtctcagctatttcggaggctgaggtgggaggatcactcgagcccaggaattcaagtccagcctgggcaacccacccctgtctctaaaaaacaacaagagccaggtgtggtggctcaggcctgtaatctcagctctttgggaggctgggacagatggatcacttgagtagtttgagaccagcctggctaacatgacgaaaccccatctttactaaaaatacaaaaattaaccaggcatggtggtgtgcacctgtagttcaagctacttgggaggctgaggcaggagaatcgcttgaacccaggaggcggaggtagcagtaagccgagatcacaccactgcactccagcctgggtgacagagtgagactttgtctctgaatgaatgaatgaatgaatgaatgaatatgaataacaacaatgacaaacccagaaatatatgggcaagacagcttaaatgtaggatgtttgcatttagccacttcactctttagtagtgaaggtatggtgaaattatgactgaattacattcayctgctttactagacaatgacaggtaattggattaatgaagcgtaaggcaaaatatagagtaattttagctcagtgtgatagtcgaagggaaaaaaattcaaatgataacaaaaaaccaacctatattcccctgggcactacgaaataacatctataccagtggttcttgtactttgggacacattggaattacctgggcatctctttaaaatactcctatctggcttctactcccagaccttctgatttatttggtatgggaggagctttggcgtcacagctctccaggtgggcctaatgtgcagcaaagtttgagaactaccatgatgtatactttttttcctagtgaaactaccactaatagtcacagtattcagagtcccttccaaaattctttttattctttgctggtgccaaaaacagaagcaacattgttaagggaagatcctcaaggcagagtggagtaaatgagtgccctctctaaatcatacaaataagtcacaatcgtaatttattttagattcatgacagctgttcatctggccacttatttatagcatacatgatccccaaattggaggcaaccgtaatgtcatggagtgcatcagagttgaagtaaaaaggcttgcattcaaatcccaattcttccacttactaacagttatgatgggcaattcattcaatcttgctgaagttctcatttttttctccctaatatgaaaataaccagatctgttttgcatggttgtaaatatctttaaaagctaatgtatgtgaagataaactataaagtatataaagatattaaataattattatctgaaaggatttttcttaaccttagagatgacgtaactttctaggtttttttttctgtattttttcattgccttaagaaggagatctgcatacagtagataataaatgcatttgaacttaacgtgtatagtagaggaagtattattttgtatttctataccatgttttaatctgggtagaaacgtaagttttctactcatgcctgggttccaacacatgtgttgccacttgttagcaaatttgtgtcagtagacatgttctaagagtcaggtttgttatctttttgtatggcgaataatatctatctttcagggctgttatggccctcacatgtagtgccgtaagcatagtagctagaatggagcatgcagaaaatgctaattcctttcttctctccaagaatatcataatcttgtgatagtacagatgacctttgaacaccacaggggctagggaccctgcccacacacaatcaaaaattcacatataatttttgactcctgaagaacgtaactactaatagcctattgtaaactggaagccttactaataaggtatacarttgattaatatgtattttgtatgttatatttgttctgtactgtatttttacaataaagaaagccagagaaaggaaaatgttattaagaaaatcataaaggagacaaaatatatttattattcattaagtggaagtagatcataaagatcttcatcttgtcttcatgttgaataaactaaggaggagaaagcagtggggttggtctttctgtcttgagggtggcagaaacggaagaaattcaaatataagtggatcctctcagttcaaacccgtgttgtctaagagtcacctgtaatttttaaaatctgagtaataatttttagtagctaaaaattcttaactgtcatttaaaaattttgttttgctgatttctatatcatttaacgttttaaaacttttttattgatgcataacggatgtacatggtcctcctgccccaccccaccccccacccccacaacatgttttttggagttttttctggtttttgtttgtttgtgttttggagacaaagtctcgctctgtcccccaggctggagtgcggtagcgcaatctcggctcactgcaacctctgcctcccgggttcaagcaattctcctgcctcagcctccctagtagctgggactacaggcgcatgccgtcatgcctggctaatttttttgtattttagtagagacagggtttcaccatgttgcccaggctggtgtcgaacccctgagctcagtcaatctgcccgcctcggcctcccaaagtgctaggattacgggcatgagccaccacgcctggccacagatggttttaaaagcagtgtttatctttatgctttttcagataagtttataccatggatagcacaaaggagaagtgtgacagttacaaagatgatcttctgcttaggatgggayttaatgataataaagcaggaatggaaggattagataaagagaaaattaacaaaattataatggaagccacgaaggtatgtttcttgtttcttttgatgtgtgtaatttaatgaccttttaactttctgtttcaaagaaaatcatttgaatatcatttgtatttaatatttcaatattttaatatatattatttttaaactacaaaagggtatggaataatctcccttctattctgttgctcctaccatccaggtttctatttcacatgcatataataggcatttaaaaccaaaataatgtatatgttcctgttcacctttttttttaaccccagtgggagaaattgtttaggtatttggatttttttttttcagttaatataacttggagctctttctgtataggtaaataaagatcttcattctttgtatgcctgtgtgtgtggatataatgtaatttattgaaccatccaaaaagtttatggataaatatatgtcatttgtagtcttttatttttacaaacattactagtgaagtagggaataacgtattttataactttctatatgtgcaagtataactgtggaagagattcctrcaatggaattgtttcaccaactacacatagcacaaaagaatatatgcatgtgtgatttttatgaattgccaaattaccctccatggtgtttctatcaattcacacttccactacaaatatctgagagtatgtattaccatactgaaactgtgccaacacagtgtattactaaacttttgtatttggcaatctgaggtaatatagtatagcattaatttgtattccacttatgaaaaattagtttcatatcttttcttttttttgagacaaggtctcactctgtcacccaggccggagtccagtagcacaataatagctcgttacagcctcaccctggtctcaagtgttcctcccacctcagactttgaagagctaggacaataggcacatgccaccaagcctggctaactttttattttttgtagagaggcggtctcactatgttgcccaggctagtcttgatctgctggcctcaagcaatccctctaccttagcctcccaaagtgctgggattataggcatgagctactgtgcctggagctcttttgatattttaaaaattatttgtatttcattttttatgaactttgattatatattctgtatacatatgcacattcaataattagttatcttttgactttgcttatggtagtttctcctgttcagaaattttttgtttgctccattttatgtagttgaatgtcaactacatatggctttcttcaaggttataaaagaattctttaatttttttaccacttttttgtttcatttatatattatagaatatatatgtattaatgtgttatgtgtattaatgtatatcaatattaatatacattatatatacatgatatataatgtatattagtatgttgtattatatgttatgtatattaataaacacaatacatgtattaatatacatgtagaaagatgtaaactttaagagaatatccttgttcttaggaaatgcgtggtgatgtccacagcaacttactttaaaatggtttagccaaaaggaggggaaagtgtgtgtgtgtgtatgtatgtgtgtgtgtatacactcatacttccccaacatatatacatagaagttggggaagaaatcaaatgtagcaggatattaattgatgaatctaggtaagggtatataggtgttcgttgtactattttttcagcttttgcagatttgaaaattccacgataaaaagttaaggaattattgttaatttcattagctatgaaaatgttactgtgatgaagtgggaaaatggccttatttttaaatgcataccgaaatcttctgtggaatggctaaatatcttgatatttataatttaaaatgtttcacttgtaatgaagcatatacagtaaaatgttaacagctgttaaatctgagtgatagttttatatgtgtttattgtattcatgtttttcctgcgttttcctgagacttttttgatattttcatcataaaaatgttcaaaaagaataaaacaaataaaacctatgaatctagttcttaggttaagaaatagaatatgtaggttaccctagatgtccctatctatctgatcctccctctctattctctgtgacccagtacaatttattaaatagtccattcttttcctactgatctggtgtgctttctcttctgttccactggatcatttgcctgtttgtatgtaaacaacatgtttttttattatcatactttataataagccttgatatctgctagcacaatttctttttttttacactttgttctttttcaagaatatcttgagtattcttgaagctttgctttcatataaattttatgtgatatatatcaaaaatatataggtgcatatataattggcacatatcacatgattggtatataaaaatacatagaataatatatattcctctagtgcatgaggtgagtttatcataaatggtaccttgtttaaattggaattttctaattgttactattccatagcaatacaatttactttttacttttttaaaactcttatcagaaaatttaaaatatatagaaaattacagagaatagtaaagtaaatccccatataatcatcacccagcatcaacaattaccaacatttttgcaaatatagttatctatcttacccttcccctactgatttttggagggaggagtattttaaaacaaattccaataaattggacacatttctagaagtttacaatttttcaaaatggactcaagaagatacagagaatctaaatagacctatataataaggaaataaattagtaattaaaaatctccccatcaaagaaaaaagaccaggccatttggcttctctggtgagttttatcaaatatttaaagaagaaatgataccaatattccacaagctcttctagaaaatagagaaggatggaacacttcccaactcctatgaggccagtatcaccctgataccaaagccaaacacaaggttatacatcattatgaatgcaaaagtcctcaacaaaatattagaggactgatttaaacaatatagcaaagagattatgcaccataaccaaatgggatttatcttaggaaagcaaggttggtttaagatctaaaaatcggccaagctcatgcctatgaccccagcactttgggaggctgaggtgggtggatcaccggaggtcaggagttcaagaccagcctgaccaatatggtgaaaccccgtctctactaaaaatacaaaaataagccaggcgtggtggcatatgcctgtagtcccagctactcrggaggctgagacaggagaattgcttgaatcctggaggtggaggttgcagtgagccaagattgcaccactgcactccagtctgggcaacagagcaagactccttctcagaaaaagataaaaaaaagagagagatctgaaaatcaattaatgtaatacatcatattaaaataaagggcaaaaaaaccacacgatcatcttagtagactcagaaaaagcatatttgataaaatcccaccactattcatgctaaaagctcttaacagacttgaaatagaagggtacttcctcaatctagtaaagggcatctataaaaaagcctacagtgtacatcatactttatggtggaaggctgaacactttctacctaaaatgaggaacaaggcaagaatgtccactctcaccttttctactcaacatagtcctaacagttctaaccagtgcagtcaggcaataaaaataaataaaagggccaggtacagtggctcacacctgtaatcccagcactttggtaggctgagataggaggatcacttgagcccaggagtttgagaccagcctgggcaacatagtgagaccctgtctcttaaaaacaaaacaaaacccttacgccgtacacaaaattaactcaaaatagacttaaagagccaaaacaatacaacttttagaagaaaatttgagaaagcctctgagaccttctgttaggcagaaatttcttagatgtgatactagaagaacaatcaataaaagaaagttgattaattggtcctcatcaaaatttaaaatgtttacacttcagaagacagcaataaaaataaaaagataggtcaggtgagctggctcacacctgtgatcctaacactttggaaggctgaggtaggaggatcaggagtttgagaccagcctgggcaacataatgagaccccaccccccaacctcttaaaaaaaaaagaaaaagatagcaatgtgccttgggtaaaatatttgtaaaacacatatgtgataaaagacttatatccagaatatacagaaaatgtctacaactcaataagacaagcaaccgaatcaaaaaatggtcaaaagatgtgaatagacatttcagtaaagaagatatacaaatgactctaggcacatgaaaagatgctcaatattattagtcatcagggaaataaaaatttaaaaaccacaaagagatgccattcatgctactattgcttagaatagctataataaataagacacagtaacaaatgttggcaagaacgtggagaaattggaaccctcctacgttgctgatgggatttaaaatggttcaaccactttggaaaacagactggcatttcctcaaaaggttgagtatagaggtaccatatgtcaaagaaaccctactcctagttacctacctgagagaaatgacaacatatgtccacatgaaaacttgtccacaaatgtttatgatagcattcttcactgtagccaaaaagtgaaaataagctaaatgtctatcaaccagataaatggatagacactatgttcagtgatgaaatgatgggcagttttttgaattattttctacattttctttaatgacttaacattaaatatttgaaaataccttgtaaggagtatttttttaatgcaatagataactgatgatccaacccactaaggcctttgatacccactgtggatcctacctaggacatactgttcttttctgaatgcaaacctgtattcatctcagagagcttgtgctgtgctaagtactgctcacaacaatcctgtgatttagttaactactaataaattcatcttacaaataaagaaactgagatgtagaaagattaaataattttagggtcacctagctagtaagtagtagagctaagttttaaatttaatcttctgtttcctgagtatgtgctcttagccaccaggttatactacagtgatgctttccttcagacatttttcttatgctttgttttgttttcctccataggggtccagattttatggaaatgagctcaagaaagaaaagcaagtcaaccaacgaattgaaaatatgatgcaacaaaaagctcaaatcaccagccaacagctaagaaaagcacaattacaggtattaattaaattgttaaataaagtggaagctggtagaatagtaattgacagttaaaatgtattgtcaagtcataactgaaaacaagatgaaatgtaaatgttcattatattgtaaagcatacatattcagcaaatgaacatactttactttgctaagtgttgctctgctcatttacataaagactccacacatagacattgtcacctctattatacagaagagtaaatgaagtcttaattaagttgagtaacttgcccagcttgataggacaggtagttagcagaactaggatttaatccaaagcctatgttctttttattgtatacatcgcagctagaaaaggccacgggataaatgtggaatgttttctgcaatgctgattttgcaaaaaaaatttgaggaatatgttaactaattaaattggagagtaacttaaaacataatcatgttatagtaaaataaaaagtcacactatagattagaatgccaaatgtacatgaacttttaagacaaaacacaagacttctaaaaccttggaaggtttttgccttctccaggatctttgggaagtaaatactccaagtttcctcttctattaaaagttatttcaggagaaaagtttggaaatatccaagttgcagggcactgtgtggtagactgacaactcaaagcagtcaaatttctgatagtaaaacaagtcatggcaagaggaatttgctctttatcaaaatctgatccaatgttaacagagctctatagtctataaggtaacaataaaattagattaatctaatatgctacaaaatccttctcttgtgacagagttcaaagatcataaattttatgttttctttatcaaactatacaatgtgtgattttttgatacatatgccttctcagagcacaagataatttttaagtggtcttctattatgatgaaagatgatttatttgtcatatcatcatttttaatgcttcacagcattccactgtgtggaggtaccataatttatttaccatatcccaccttggtttcagttttttatttcatacgcaaccctgtgattatcattcttatctttgtactctagtgctgttattttgaccaaagatggtatcattttacattttcaacatgaaagtattgattttctcacatagttgtaaaccattaatatttccttattatgagaatttcctcttttattctgtttgcgagtatatacactaagttgctagcacaagagaccaaaaatgtaatattttaaataagagctgctttctttctcacataataagtgagtagttctagctggtgagtggctgattatcatttagagacccaggttctttaaatcatattgttccatcatcccctggtgttatccttacctgaattaacaaaagtgaattattttccatccatattccatctcctggttaaggaagaaagggaaaatattgaaggcaagtacagtaatttgctattaaacaagtgaaaaagaagttgcacacattacttcagctgacattctttggcaagaatttaagttacatggccacacctaactgcaggagaagctataactttagctgggtgccatgtgcccagctgaaaatccattaccatggaaggaaggaagaatagattttggggttcaagcagcagcctaaagcaatgttttttgcccacatgtctgggggagtttatatctatttatcttgatttataaggtcttaatatattagagattttttcttgccatttgttatgaatacttttccaatatattgtcttttaattttgtagtttttcccatataatttttaatgtttatgtaatcaaatccagtgacttttttaaaaaaagattatatatatatatatcttcctttcccttcaaaatttattttttttaacttttaagttcaggggtacatgtgtaggtttgttatataaataaactggtgtcgtgggggtttgttgtacagattattttgtcacccaggcattaagcgtagtaccactcattagttattcttcctgatcctctccctcctcccatcctccaccctccagtaggccccagtgtatgttgttcccttgtatgtgtccatgtggtttcatgatttagctcccacttataagtgagaacatgcggtatgtggtttctgttcctttgttagttactagggataatggcctccatctccatccatgtccctgcaaaagacatgatctcattcttttttattgccacacagtattccatggtgtatatgtacacaattttctttatccagtctatcattggtgagcatatagattgattccatgtctttgctgttgtgaatagtgctgcagtgaacaaacacaagcctgtatamaaagaccttatttttcaaagcagttttaggttcacagcaaaattgaataaaaggtacaaagattttccatatactcctgtctccccacaggcatagcctcccctgctatcacatcccccaccagaggggtacatttgttacagtttatgaatctacgttgacacaacattatcatccaaagttgatagtttatattagggttcaatattggtggtgtacattctgtgggtttagacaaatgtacagtgaggtgcatccaccattatagtatcagacagagtagtttccctgccctaaaaaaatactctgtgctccatctattcatccctccctcccccactaacccctggcaatcactgacctttttactatctccatagttttcccttttccagaatgtcatatattagaatcatacaggatgtagccttttcagactgattgtttttacttatgcagtgtaatgtaaatgtatgcatttacatttccttcatgtcttttcatggcttaatagttcatttattttatgtactgaatattattcaattgtctgggtgtaccacagacaattttttttttttttgagatggagtctctctcacttcgttgcccaggctggagtgcagtggtgcaattttggctcactgcaacctccacctcccgggttcaagctattctccctcggcctcccgagtagctgggataaccagtgcccaccaccatgcccagctaatttttgcattttttagtagagacggggtttcaccatgttggccaatctggtctgaaactcctggcctcatgtcatccgcctgcctcagccttccaaagttctgggattacaggcgtgagccataccacagacaattgaataatattcagcacataaaataattgagctatcaagctatttgtccatttacctactaaagtttactttggttgcttctaagttttgggaattatgaataaagctgctgtaaatatccatggccaggcttatgtgtagacataagttttcaactcctttaggtaaatactaaggagcgcaattgctggataatatggtaaaataaaaatatgtttagctttataagaaactgccaaactgtcttccaaagcgaccataccattttgtcttcccaccaacaatgaatgaggattcctgttgctaaatatcattgccctcatttggtgttgtcagtattgtgaattttggctattctaatatgtgtatagtggtatctcattgktgktttaatttgcatttccctgatgacatatgatgtggagcatcttttcatgtgcttatttgccatctgtatatgttctttgttgaggtgtctgttaaggtccttgaccatttataatcaagctgtttgctttcttatttttggtttttaagagttcttcgtgtattttgggcaacagacctgtatcagatatgtcttttgcaaatattgtttcccaacctgtggcttttctttttattctattgacagtatctttcacagagcagaaatttttaattttaatgaagtctagtttatcaattctttctttcatggattgtgcctttggtattgtatctaaatagtcatcatcaaatccaagtccatctagattttctcttatgttatcttctaggaattttatagttttgcattttacagttaggtctgtgattcatttgagttcatttttgtggaggaaataacttcatctttttttcttttttttttttttaacatgaggatatccaattgttccagcacaatttgttaaaaaactcttttcttgctaggtgtggcggctcacgcctgtaatcccagcactttgggagaccaaggtgggaagatcgcttgagcccaggggttcaggaccagcctaggcaacatagcgagaccctgcttctacaaaaaatagaaaaaattaactcggggtggtggcacaggcccatggtcctagctatttgggaggctgaggtgggaagattgtttgggcctgggaggtggaggtggcagtgagctgtgattgcaccactgcactccagcctgggcaacagaatgagactctgtctcaagaaaagaaaaaaaagaaagaaactcttctccattttattgagtcattgctcctttgtcaaagaccaattgtctgtatttatgtgagtctatttctgggctctgtattctgtttcattgatctatttgtctattcttttgccaataccacactctcttaattactgtaactttatagtaagtcttgaagtcaagtagtttcagtccttcagttttgttcttcttctacaatattttgttggctaattggatcttttgcctctccatataaattttagactcagtttgttgacatccacaaaatagcttgctgggattttgactagkattgcattgagtgtatagatgaagttgggaagaactggcatttgataatagagtcttcctgttcatgaacatggaatatctctccatttaaagatgctccttggtttacaatggagttacatttggataaacccattatacagttgaaaaattgtaagtcaaaccatcataagtccagatattccctgacttaatggtgggattatgtccagataaacccctcataaagttgaaaaatcttaagttgaaccatcataggccagagaccgtatttagttcttctttgctttctttcttcagactttgtagttttcctcatgttgatcttgtacatattttgttacacttgttcctaagtatttcatttttggaggttttaatataaattgtaatgtgttttatgttttgttttgtttttgagacagagtctccctctgtcacccaggctgctgcgtagtgggatgacctcagctcactgcatcttcctcttcctgggttcaagcaattctcctgcctccacttcctggtagctgggattagagatgctcactgccatgcctggctagtttttgtatttttagttgagacagggtttcaccatgttggccaggctggtcttgaactcytgagctcaagtgatccacctgcctcggcctccaaaagtgctgggattacagatgtgagccaacatgttgggcctgtaatgtgttttaaattttaaattttacttgttcattgatggcatacaggaaagtgattgacttttgtatattaaccttatatcttgtaactgattattatcacttactagttccaggaacaatattcttataatttttgttgttgttttttttttttggtctgggtattgtacttggaaaattattcctcataaccatgcctatgtcttcttttagtatttttatagctcttggcatactcatatctttagtcaatttggaatttgttttgatgtaaagtgtgaagtatgtttttcttaaatggtgttatgttttccctgcatagtattattttccctaagtggtgattcacttgtcccaactccatttattgaatcatgaatcctttcttcactgagttgaaatgaagtacttccaaattaaaaaattctcaattgttctttgatttatttctggactctctcttctaatcaattcagtcttttcctgtatcagtaccatacagttttagttattgaacggtaggaatatagtttaatattctcgcttgtaactcttctttaaaattttttttgtatttctcatgcatgtttctttcaaataaacttaggcatcattttatcaaggttttaaaaaaatcagttctatccacagtaatattattttaaaattgatattaatccttaagcaacgtactttctggacattttcattttattgatctataatctacaaatatatttaacagttttaatgatacagtatataagtgatgctaacaactgttagctattcatactatttttaaagctcatatccttaaatatactaataatctgaaggaatagaaagtatctttcattgtatagcagaatttaagattttgttccagttttggttgactatttcatcagaggctctctggcatcttttgcaacaggaatggcaggaaacgtgttttatgttgattgttcaattgtttcatttgttgagcttcctccaaaagaatttgtataaatgggaggagattgaggaagtttaaggagtcaagaaggcctgagagaacagagttgttttcgtaggaaatgtgtttctattttagagtcttaaaatttccaagtactcgattttattatgtgtgatatgatagtatgaactattgctagtcgagctgaggtaagcaacttttacaggcatgaacctctagggtgttcagaacctctctaagtatactccaccctttcccaatctcagtggacttcttaaagcacagtcatttttgtaactgacaaattgttgtataagaacatgggttcataaatcaagtagacagatgtttatgttacattgcatgacagctatacagcaaatcagtgcattttgaccattttggcaatttattgatttggggtttgtttttttgttttgttttgtttttttttttttttttttttttttttagagacagggtctctctctgtcacccaggctggagtgcagtggtggtaccatcatggctcactacaacctccaactactgggctcaaacagtcctcccgcctcagcctcccaagtagtggggggactataggtgtacactttcacactcagttaatttttaaaatttttcgtagagacaggatctcactatattgcccaggccagtctcaaactcctggcctcaagctacccttccacttaagcctcccaaaggggttaaaggcatgagccactagggctggccaacaattgattttattaactcaaatttattcaacagtcttggggaaatactaatttaagaaaacaaaaccaaaaaaacacattatttctgaaatagtctcctcaatgtaatagaaatgggatatttataaagaaaataagacataatatggatggaaaatataccattacagtttgatttgagtgtatttcaacattacagactttaaaaaatctattatagggaagcatcataacataatcaaaaacagacttcagagtaacctggtttcagtgtttagtgctaacatttactagctctatgacttagggcaaattacttactcttactgagctttagtttcatctataaaatgggaacaataattatgatctcagaattatgaccagtaaatgagttaacataggaagcacttagcatattatatgacacatatacccaataaatgtaacttctactttataattatagataattaagcccttattgtatccctagataggtgcattacatgggtgtctcttttaattctttcaataacctattgaggttggtttagtaccactttacaaataaggaaagtaagcatgaaaggggttaaattgctccctgtcctgtaactaatgagttgcagtgctaggacccgaaccaaagccgttattctattttttgtttctttaaaaaaatttgtttttttattatactttaagttctgggatacatgtgcagaatgtgcaggtttgttacataggtatacatgtgccacggtggtctgctgcacctatcaacccatcatctacattaggtatttctactaatgctatcccttcccttgcccaccacccctcaacaggccccagtgtgtgatattcccctccctgtgcccatatggtctcattgttcaactcccatttatgagtgagaacatgcagtgtttggttttctgtttctgtgttagtttgctgagaatgatggtttccagcttcatccatgtccctgcaaaggacatgaattcattttttatggctgcgtagtattccatgatgtatatgtgccacattttctttatccagtctatcattgatgggcatttgggttggttccaagtctgatattgtgaatagtgctgcagtaaacatacatgtacatgtgtctttatagtagaatgatttataatcttttgggtatataactggtaatgggattgctgggtcaaatggtatttctggttctagatccttgaggaatcgccacactgtcttccacaatggttgaactaatttacactcccaccaacagtgtaaaagcattcctatttctccacatcctctccagcatctgttgtttcctgactttttaatgattgccattctaactggtgtgagatggtatctcattgtggttttgatttgcgtttctctaatgaccattgatgatgtgcttttttgtttgttggctgcataaaggtcttcttttgaagtgtctcttcatatcctttgcctgctttttgatggggttgtttggttttttcttgtagatttgtgtaagttccttgtagattctggatattagctgtttgtcagatggatagatagcaaaaattctctcccattcagtaggttgcctgttcactctgctgatagtttattctgctgtgcagaagctctttagtttaattagatcccatttgtcaattttggcttttgttgcaattgctttcagtgttttagtcatgaagtctttgcccatgcctgtgtcctgaatggtattgcctaggttttcctctagggtttttatggttttaggtcttatatttaagtctttaatccatcttgagttaattgttgtataaggtgtaaggaaggggtccagtttcagttttctgaatatggctagcaagttttcccaacaccatttattaaatagggaatcctttccccattgcttgtttttgtcaggtttgtcaaagatcagatggttgtagatatgtggtgttatttctgaggcctctgttctattctattggtctatatatctgctttgttaccagtaccatgctgttttggctactatagccttgtggtatagtttgaagccaggtagcatgatgcctccagctttgttctttttgcttaggattgtcttggctatacaagctctttttttggttctatatgaaatttaaagtagttttttctaattctgtaaagaaagtcagtggtaccttgatgggaatagcattgaatctataaattactttgggcagtatggccatttttaccatattgattcttcccatccatgagtatggaatgtttttccatttgtttgtgtcctcctttatttgcatgagcagtggtttgtagctctccttgaagaggtccttcacatsccttgtaatttgtattcctaggtattttatttattctctttgtagcaattgtgagtgagagttcactcatgatttggctctctgtttgtctattggtgtataggaaagtttgtgatttttgcatattgatttggtatcctgagacattgctgaagttgcttatcagcttaaggagtttttgggctgagacaatggggttttctaaatatacaatcatgtcacctgcaaacagaggtaatttgactccctctcttcctaattgaataccctttatttctttctcttgcctgattgccctgaccagaacttccaatactatgttgaataggagtggtgagagaggacatccttgtctagtgctggttttcaaagggaatgcttccagcttttgtccattcagtatgatattggctgtgggtttgtaataaatagctcttattattttgagatacgttccatcaatacctagtttattgagagtttttagcatgaaggggtgttgaattttatccaaggtcttttctgcatccattgagataatcatgtagtttttgtcattggttctgtttatgtgatggattacgtttattgaattgcatatgttgaaccagccttacatcccagggatgaagctgacttgattgcgttggataagctttttaatgtactgctggatttggtttgccagtattttattgaggattttcgcattgatgttcatcagggatattggcctgaaatttttttgttgttgttgtgtctctctcaggttttggtatcaggatgatgctggcctcataaaatgagttagcggggagtccctctttttctgttgtttggaatagttttagaaggaatggtaccagctcctctttgtacctctggtagaattcagctgtgaattgttgtgtttttagtagaggtggggtttctccatgttggtcaggctggtcttgaactcccaaccgcaggtgatctgcccgcttcagcctcccaaagtgctgggattacagacgtgagccactgtatctggctgtgaatctgtctggtcctggacttttttttggttggtagtctggctagcagtctgcttattttgttaatcttttcaaaaaaaccagctcctgaactcattgatttttttaagggattttcgtgtctctatctccttcagttttgctctgatctcagttatttcttgtcttctgctagctgttgaatttgtttgctcttgcttttctaattattttaattgtgatgttagggtgttgattttagatcgttcctgctttctcctatgggcatttagtgctataaatttacctctaaacactgctttagctgtgtcccagagattctggtacattgtgtctttgttctcttattgatttcaaagaacttacttatttctgccttaatttcatatttatccaggagtcattcatgagcaggttgttcagtttccacgtagttgtgcaattttgagtgagtttcttaatcctgagttctaatttgattgcgctgtggtctgagagactgttatgatttctgttcttttgcatttgctgaggagtgttttacttccaattatgtggtcaattttagaataattgcgatgtgttgctgagaagaatgtatatcctgttgatttggggtggaaagttctgtagatgtctattaggtctgcttggtccagagctgagttcaagtcctgaatatccatgttaattttctgtctcgttgatctgtctaatgttgacagtggggtgttaaagtctcccactgttattgtgtgggagtctaagtctctttgtaggtctctaagaacttgctttatgaatctgggtgctactgcattgggtgcatatatgtttaggatagttagctcttcttgttacattgatccctttaccattatgtaatgcccttctttgtctcttttcatctttgttggtttaaaatctgttttatcggagactgggattgcaacccctgcttttttttcttctttctttctttctttcttttctttctttcctttcttttttgtttggtaaatcttcctccatgtctttattttgagccgttgtgtgtctttgcacatgggatgggtctcctgaatagagcacactgatgggtcttgactctttatccaatttgccagtctgtgtcttttaattggggcatttattttgatcctgtcataatgatgctagctggttattttgcccattagttgatacaggttcttcaagtgtcagtggtctttacattttggtatgcttttgcagtgcctggtaccggtttttcctttccatattcagtgcttccttcaggagctcttgtaaggcaggcctggtggtgacagaattcctcagcatttgcttgtctgtaaaggattttatttctccttcacttatgaagcttaatttagctggatatgaaattctgggttgaaaattctttaagaatgttgaatgttggcccccactctgttctggcttgtagggtttctgcagagagatctgccgttattctgatggacttccctttgtaacctgacctttctctctggctgcccttaacattttttccttcatttcaaccttggtgaatctgatgattatgtgtcttggggttgctcttctcgaggagtatcttgtgtttttctttgtatttcctgaatttgagtgttggcgtttcttgctaggttggggaagttctcctggataatatcctgaagagtgttttccaacttggttccattcttcttgtcagttttagtttcaccaatcaaatgtaggtttggtcttttcacatagtcccatatttctaagaggctttgtttgttcctttwattcttttttctctaaccttgtcttcatgttttatttcattaagttgatcttcagtctctgatatcctttcttccgcttgatcaattcagctattgatacttgtgtatgcttcccgaagtkcttgtgctgtgtttttcagctccatcaggtcatttatgttcttctctaaactggttattctagttagcagttcctgtaaccttttatcaaggttcttagcttccttgtgttgggttagaatatgctcctttagctcggaggactttgttattacccaccttctgaagcctacttctgtcaatttgtcaaactcattctccatccagttttgttcccttgctggcatgaagttgggattctttggaggaacagaggtgttctgttatttggaattttcagcctttttgcactgttttttcctcatctttgtggatttatctacctttagtgtttgattttggtaacctttgaatggcgtttttgcgtggttatcctctttgttgatgttgatgctgttgctttctgtttgttatttttccttctagcaggaccctcttctgaagttctgctggagtttgctggaggtctactccagaccctgtttgcctgggtatcaccagtggaggctgcagaacagcaaagattgctgcctgttccttcctctggaagcttcatcccagaggggcaccatcagatgccagctggagctctcctgtatgaggtgtctgtcaacccctgccatcaggaggcattggggtcaggcacccacttgaggaggcagtctgttccttagcagagcttgagcgctgtgctgggcgatccgctgctctcttcagagccagcaggcaggaatgtttaagtctgctgaagctgtgcccacaactgcccctttcccctggtgctctgtcctagggagatgggagttttatcaataagcccctgactggggttgtggcctttctttcagagatgccctgcccagagaggaggaatctaggaaggcagtctggctacagtggccttgccaagctgtggtgggttccacccagttcgaacttcccactgggtttgtttacactgtgaggggaaaaccacctactcaggcctcagtaatggatgacgcacctcccttcaccaagctggagtgtcccaggtcaacttcagactgctctgccagcagcgagaatttcaagccagtggatcttagcttgctgggctccgtgggcgtgggatccgctgagccagaccactcagctccctggcttcagccccgtttcccagggaatgaacggttctgtctctctggcgttcaggcaccactggggtatgaaaaaaaactcctgcagctagctcagtgtctgcccaaatggccgcccagttttgtgcttgaaacccagggccctggttgtgtaggcaccccgtgaaatctcctggtctccaggttgtgaagacagtgggaaaagcgtaatatctaggctggatagcaccatccctcaccaacggcacagtccctcacggcttcccttggctaggggagggagttcccagaccccttgtgcttcccaggtgaggtgacaccccaccctgcttctcctagcctttcgtggcctgcacccactttctaatcagtcccagtgaggtgagccgggtacctcagttggaaatgcagaaatcacctgccttctgccttggtctcactgggagctgcagccatcttacccgggaatccccgaagccgttattcttaacgagtgtgacacacaccagttttgagcagtagcaaaaggaacaacgtgcatgttggagactcagatcagaacttgaaagtcattggaaaatggaagaaaggacaatatgaatggggatttcagttgaagaaacttttaaaagcagtagtggcatgcatctggttgatgtagaaagaaaagagttcagacaagggtgactaatgagagatagtaaaggaaagtggaatgtatgagtcatgcagtggagaggtttccttttggcaactacacttgctttaagcacaaaaaaagagaatagcttgctgaagacattattatagcattaatatatgagtctgaggagaattttttcccatttgacttgctttctatttattatctttytcttttctagatgattccatgtccaagtatttcagatgccactttcttattctcatttgactgttatttcttaggtatattttctggattaaaatagagtagtttttagtttacatttgtttttgttaatctccataatttgtttatatgtggtcatggtgctattctctggttcagaattgaggtactaaaagaagtaggttttaattagcatgttaaattttggtaatattgaaaggttccatttattaggtatgggattttactgtaagaagttagccttcttcaagatttttctactagtactcctttcactttttaaaccaactttaatatactgctataaattcattatttttctccttctagtctcccctccccgtctctcttgtgagaaaataatttgaaatcagataaggtctttctcctgaaggaactgacaatttagtatctaatacagtaagtgccatgcaagagcaggaaagcaaggaacattaaattctgtggcacagaggacagacattccattaagatacgaagagatatttcagctgatccttgaaggcttgtgacagagcttggaaaggcactctagacagaggaacagcctgaggaaggcatagagcaacccaggtcattcagtgagctgtagcctaaacaaggggaagcctcctacagatttcactgtacctcctgtagacaaacatgagtcagggtgattgcttctaaaagaggagttatagttttaacctgcgactagtgggcagctagtgtcacagtaagactaagaaggaaggacataaaaaaaattctgcagagtggaggcaaagctggagtacaacatgagggaaaaagccacatatacacctatagctctccacctttgagaaaacttgctagagggaactccacgttccatagatgaccccacttgctcattgctggctgtttttctctcagtttttaatgttttattatgcagctatccattgatccttttagtaatagatgtatttattgaacttgtgccatgtaccaggtactgttctatgttctgtatattttccagcttatttaatagctttcttatgatttttactttaatggtcttggtaacttccctatgttgcatagatcacaactattacacagccacctccagctgcagggtaagctgggaaagtgagtatttagcctttcttgccttgatagtggagrccggccacaaaaatggaagttagaaatgagtatgtctgctgcaaaatcacttttcttacttgcttcctttgtttatttctaccccctttcatttctttctcgttgtaaaactaagttgttagttttctctgaagaaactaaaattctttaaagattaagaatcttcactattgtatttgacatatatattaaagttcatgaagaataaattacagcttgggttttaaattttacttgtatagattaacatcaaattttaacattataaaagcaattctacagaggaacatttacattatgctacagwwtcttcagttgtaccttcctgttcagcataaacatcatatgccaaagaggtactatattttgttgtatatttcctttgttgcttttttaagacattattattatgaatcaaatgtcagttgtttattttacttacattgaagcttttagttatagtgagttggactccaaatttataaagcagtagaatcatttgataaaagcagttggattagatcattcattcattaaatattaagttcctgttatgtgcctaagggtatggagagatgaaagggttagtagggaattatatttgaggataggctgtctctatgaaaataaaagcaattaccaattttaatttaaaaaacaatacaatatacatagataaacacttataaacaataataaaatataaacccataaacacccatgamcaacaaaatacacacccataagtaagtggatgggtggatggatgaatggatggatggatggatgratgggtgtgtggacagagactgatagacacttaataaattaagattaatgttgtggttaatggtgtttcaatattatgttgtctaaaagtatgttaacttttttaaaaaattwaggttgacagatttgcaatggaattagaacaaagccgaaatttgagcaataccatagtgcacattgacatggatgctttctatgcagctgtagaaatgagggacaatccagaattgaaggataaacccattgcygtaggatcaatgagtatgctggtaagtaaagatcaaatacaaaaaggaaattttataacgtactcaagtaagctttactgtttcatgaagggggaattctttattgaggtctaccagtttgctgagtatttttctgggtgccttatatatgactcaattactgaatcctttcaacatactttaaggcaggggaccccaacccccagttcacagattggtattggtccatggtctgttaggaactgggcctcacaacaggaggtgagcgtcaggcaagcaaacgaagcttcgtctgtatttacaaccacttcccatcacttgcagtatgcccgagctctgtcagatcagttgtggcattagattctcataggagtgcaaactctattgtgaactgcacatgtgagggatccaggttacatactcattatgagaatcaaatgcctgatgatctatcactgtctcccatcacccccagatgggattctctaattgcaggaaaacaagcttagggctcccattgattctacattatggtgagttgtgtaattatttcatyatatattacaatgtaattataataggaataaagtgcmcaataaatgtgacgtgcttgaatcatctcaaaactatcaccccaccagtccgtggaaaaattgtcttccacgaaaccagtctctggtgccaaaaaggttaggaactgctgctttaaggtactagtttttatttccatttggcaaaaaagaaaactcagagagatgtttaataacttgcccaaagttacaaacctaataatttccatggcaaattaaatttttccataagtaaccgttctagttaaagagagttgaagaagaaagaaaaggaaatgttattctaaagtattaatagagattttcaaactgatctgcaggccaaatccagctttttattggaacaaagtcacacccatttatttattactattgttgcactaaaagagcagagttcaataattaagtgatctgcaaagcctaaaatgattactatctggacttccacagaaaagaaaaggtttgccaaccctagttctggaataacatacttcgttaatagagtacatttagaatgcagttaaattgtttttcccatgacttagaacttttgcttttctgattactgagttgctcttcctttttaccactctaaccttagaagaaccaggatagctatgtgtggctgaaagtgtgttggaaattaaaagtagcaactaaaatagatgagataatatttaaaaagtattagaaaaacaagaagagttcttccctgttcctaactccttcccatgccttagatagctacaaaactaattcttactgagtgattattttattataaaactataatctgtttgtttttttatctctgcctctgtgagtatgcaggcagctgataagtctgattccaaaacactgttttttgaaaggaaactcccctttcctacaaatcatcaataaatatttcaaaaaatatatttaattttattaagatataacaccataaatttatgtatgtttatgtatgtgtatacatacaaacttgctgtagccatgttaaagctaaaccaactgcttttgaaatctacaaaatattttctttcctacaatttctgtcctcctaaaaatcagttattgtttctaaattcaaaattattgttatatttaaacaaagattaccccttttgtatgttgaacaaatagttttcccttctactaagcataactttttgtcctattaaacatatgaaagtatatctacaaattaatgggagtgattgtttgattattcccactgataaaattcttttttggcgaatttgatggatttttgaaatgttctaacttggcactgagagttgcaactgagatcctacagcagttacctattgctgcataacagcctcccccagtatttagtggacagccaaaatttatttgctcatgattctgtaatttgagcagagtgcgatggcgatggctcaaccttgctctacctggagttggctagggcaatttaactgaggctaaaaaatccaaggtggcttcattcataggtctgrcacttcgactgaggagattggaatggattccagcttcagaactttctcctctccattgttgcttcaacatttagtaatctaccccaaaatatttacaatggttgctggattacaaaaagcaaaagcctaggtttcagaactcagtgtcacttccttcacattatttttatcaaggcaagtcacgtggcatgaggaactagaacccacttttgataagagtaacttgtaaagtattgtggctgtgatctacaatrtaccacaaatctaaaagttagagaaattcttatttaaaagtttgtttgtcctctgctatagatctagcttttatgtcaattatattaaacttatttactaaaccattggttttgtttctagtgctatccacattttctgttccagaacactgaccaaggattagtatagttctgagtactatcaagatgttttaagtgccatttgaaaatcattagacgaaaattcatattattctgaaataatcccttcatttgtttctgttttgcatttctttgaaatttcacttgagattctaaataaggatttaatttgtgataaaatttgttttataaatagtactgtggtctaccacgttcacatagactttcatcagatatcatcaccaacaggatttaataagcaatattctcctttttactctcatacttttgtagttccatctcctagtcaaaatgttttcagcaaaaaagataattaagccttaagaaaaaccttaatttctaaacttattttaagctttaatcacttcattttggagacttaatttggctgaccacatagaccttttatttttgttctagatgaaaagtttccaaaatcccaaatagaccaaattcgaaaagtttactattatactatactattactttmtataatgtaacatctatactaattgtactatactattattttatgactattctatacaacttaccatactattactttcatgtaacataactcactatcatccaaattttgatattcattctataataagtatrccttaaaaccaatgaagtttagttggtagaaatataagaaaatctttttattagcacagtcttgcttatacctggtatcacattataaatatagggatagtaatgggagagggtcatggtatcaaaatacygtgacagaataagtcaaaacttggattaaaacagtggcctataatcagagaaatgcaaatcaaaaccacaatgagataccatctcacaccagttagaatggcgatcattaaaaagtcaggaaacaacaggtgctggagaggatgtggagaaataggaacacttttacactgttggtaggactgtaaactagttcaaccattgtggaagttagtgtggcgattcctcarggatctagaactagaaacaccatttgacccagccatcccattactgggtatatacccaaaggattataaatcatgctgctgtaaagacacatgcacacatatgtttattgcggcactattcacaatagcaaagacttggaaccaacccaaatgtccaacaatgatagactggattaagaaaatgtggcacatatacaccatggaatactatgcagccataaaaaatgatgagttcatgtcctttktagggacatggatgaagctggaaaccatcgttctcagcaaactattgcaaggacaaaaaaccaaacaccacatgttctcactcatagatgagaattgaacaacgagaacacgtggacacaggaaggggaatatcacactctggggattgttgtgtggtggggggaagggggagggatagcattaggagatatacctaatattaaatgacgagttaatgggtgcagcacaccaacatggcacatgtatacatatgtaactaacttgcacgttgtgcacatgtaccttaaaacttaaagtataattaaaaaaatatatgatagaatgatgaccttgagtcattaataaaaaacaatgcttaatacattctatttttggaaaacaacaaaaacaaaaacaaaaaactggcctataaatgaaatgtccttgaattgaaaatgcacatattaatgtgtttcttatgaatgcattgatcaatatgtccatttaggtttgtgtatttttttccatgtggtcaattttctttcagtctacttcaaattaccatgcaaggagatttggtgttcgtgcagccatgccaggatttattgctaagaggctgtgcccacaacttataatagtgccccccaactttgacaaataccgagctgtgagtaaagaggtaagttaatgtctcacccctactttaggctttcactgagttcctgtcacctacagaatctcaagtccaagtgccttagcacgtaggatttggtcttagcttatcctttcagttgagcctcctatcacttcttcagcttgtatattgaatactgagctgcatatagcatccagaatacatcattctttttcccaattctttgcctttccatgcagttttcatttgcttagaaaacttcccatttcctcaaactttgaactgccttaatgataatataaaattaaatttagctattttttcttaatgtacaatatacattttttctagaaccacattttatttataacttacagaatctactcrtcattaatttcaacctattgtctgaataattacttattaatgttgttaaacagtgacaaaattcatgtattttgattagcctactttacttgccccataatcatttgctgtctaagagactgataattgaaaagggagtaatccattgcttcaaaaaggatctttgaagtagatttgattatttactaaaattgccaaactgtcatatgtgaaaaccgccattttttctattttttatgacaactggtctatcatgcagtgctggaatttaatttttgaattaaaattttagactactacatcaaatacttttagactgctatagtaaaatgtgtttaagactgctgcctgaatggaaacacttaaaaaaactgtgacctaatacttattactctttagttataccaggggtctttaaattcacccctcttatttgtattccacctcattttccctagaagtgacactattccaagtttaaacacaggtttgtttgttttttttctgtccaaggcagtctgtgacagcaagtgctttttgcatacctctgaaaaggtggtggaggagaggggagcacacttacatttggttactgcttatctctttcattgtattcctaattaaaaagagataaaatactaatcataaatatagccttttaagaagttttaaaaatcctacaaaagtttagtaagaaaaggtattttttaaagtcgtactttaactcagcaaaacttctggcagtatgccagtgaaaaccraagtgtttttagttattttagtctggttatttatgtaagtcagagaactcttcaaatttgagccggatctagctagtttatatgcagataacaaatgagttcttctgtgtaaatgaactgtagaacaaattcatcactgcctatggatacataaatattcatgacttggttagaaaatttaagaaaaagccctcccgttttttttgacacagggtctcaccccatagcccaggctggagtgccgtgactcgatcatacctcactataaccttaaactcttgagttaagcaatcctctggcctcagcctcctgagtagctagattgacaggcatgcatcaccacacccacctaattttaaaatttttttgcagagatagggttttcctatgttgctcaggctaggcttaaactcctggcctcaaaaaattatcctgcccaggcctcccaaagtgctgggattacaggcatgagccatcatgcccagttagccatttttgttttatccaaaatattggagctttaagtgcttgatttttactggaacgtctcttttaattcttacagcaatatcctatgyaaaggaagttaataaatactcaacagtgtctctagggagtacttctcattcagaatcttagttggctgccagttacagacttcacagagtttcattttcattggaaagattctatttgagcacattataacaagaacaaagctaattaaggcactctctgagtaaaacttggccaagtttatatcaccattttctaaaattccctttgactcagctgttcataattatattaagctaaaaacctttgtttttataaaagaagaaacagttttctcatgatacagtagacagttttaaaagctaaatggaagcttaacgtaattcagcaaatatgttttctaatataaattttttttgaggcagggtctcactctgtcacccaagctggaaaatatgcatattattttgacaaccattgcctctaattatagctaatacttaagtggttagaaaaaaaagtcatagttttatgtagtaacactatgttatataaaaggcatttctgaattaaaagccactataattctaatctttatatgtatttcttttatcctaagatgttactccagacttttccccatcatttaaggtaatcatggagtacactatagattgtcatttttttccattccagatcttaataagtaataggaaatagaaaacattccttttcctgtatggattaatgcattaattaatgttaagtggacttttatgtgcatgttataattaattggaatattttctaaagcaacatagtacctttatataagattattcctttttaaaatgaaccaaaaacaataaatcacaaaaggcaggagggaatagaatcctatcattcccacttcagcttctgacgagctacctaaaaccttaaccatttttttgtatgggcctaccagataatgttttctgagatttatttgaattgcttattataactagatataggtagctaaatagagattgtatcaaatgaagctattttatggtcttctgccttcatggtctattttaatacaaaaggaaattttgaaaatattccctggtagtggattatttattccttaaatccatgaactattgactgcaggattgttactgtagttgcaaactaagaatattaacatttcttatcagctacatatgacagaagaagtttgctatcacagcaaaatttaaacttttttttgtttcctttgaaggttaaggaaatacttgctgattatgatcccaattttatggccatgagtcttgatgaagcctacttgaatataacaaagcacttagaagaaagacaaaattggcctgaggataaaagaaggtatttcatcaaaatgggaagctctgtagaaaatggtaagcaacttattaagactatcaaaccaagaagcagtgaaaaaaaaaaacccacaactctttgaattaatccaattaatttattagcctgcataggtagaagggatagatatgtacctttataaaaatgtaaaatcagaaaattttaaaaataccagtgggttttctgagttaaacatgtggaatatcacatataaacaaaatgtgattgttaaatctctgagcttaagagtctgcagagtccctgaacaaagtaattttatagcagttattttcctaaggtctaactaacaaagagtttggatggcattgaagctgaggaagttgtctgtttaaagcggccttttcttgttgttagaaaagactagcctcaaacatatcaaaacattggatgattctatttttcttcattttcctaattttctataatctaattattatagcaattatgactgtttttagctctgccaaaattaatgacttcccactcccttctttgccttagactttataatttcaagactccagggtttttttaaaaaaataatccctttatgacctatccaaaagcaatgccaagaaacatgcagatattacacatactgctttcaacattttgtcaaaggtatgattatgtctgagatgtcctggacccctgaacaaagttcacctggatgaaaaagtgacacagaagggtttgctcacaacccacaggaacatttcatgtgcaccactcattgcttcagacgggccaggcagtgctggggagacctgtttgtaactttccctgaagcaaaaatggtagatccacaatgacattaatctaactctctcacattatttgtgactcacatcatttgatgcaagtttaatatgggcatcaaatacaacttcattaccttatttaaagtgctaagggatagctctctctttttttttataggagcattaaacaataatcatcatttctcgacacaggcacagagcaaaaggttttccttatttggtgtaactttattgtttgaggatgtggaacataaagcctgatgtcactttgtataaaatcttactttattaattccttactttcacaagagaatgggggraaatcattaaataattatgtcaaagcatcccctgagggcctcccataacaattacttgcatgatgtgttttaaaagctttacattgggattaaagtaaatgttttcattttctactaatttttttcttttttttgagatagggtctcactgtgttgcccaggctggagtgcagtggtgcagtctcagctcactgcaacctccgcctcctgggttcaagcagttctcctgccttagactcccaagtatctgggattagaggcgcgtgccaccacacccgactaattttttgtatttttagtagaggtggggtttcaccatgttggccaggctggtctcaaactcctgacctcaggtgatctgcccgcctcggccttccaaagtgctgggattacaggcatgagccaccacgcccagcctactaatgttcttttcatttattataatgtccaaactcactatgaatatgtgaatttttaatatctattgcttttaacatatttacttgtatattgccctcttcgtgtattttcatattcttaaacaattggaatagttaaacttttcttctcatgtgtaaatacctgtgggctggactttcaggcgtgtctcacctcacatcatgccatgggaaattgtcaatagtgcattggaactgtggaaggcaattgatatatcttcctctaaagtccaagacattgttttgctgtttccccattttctaaaaggtgtttgtctttggaaatatattgctaactaccatctctacatacaaataaaataataattttttaaatgtttactctcccatgtaaatctggatggtgagtgccagataatataagaaactgaaataccatacactttttagcacttgtcttccaaatgaaatgctttaatcctagtgttacattctgattaccttagttatggggattataaagatgtttctgtcacaaagcaaataagaaactacttcagctcttagttacacagccaggcctcacaaaaaagtagaaagtagttcagattgaaaaggtacctgaacattctgcagcagctctgataatgtgtgagaaggcagcattcttcacttcctgctgtatagttctgctctcacagtggctcacctgagggcagggtggtagaggcatgaggtacaaaacatggcataaaaaactctgcagaacgggtttatgaatgtggcagataacttacttggtttgcagtttttctgtagctttctttaccgtgacttctacccatccagatggggaaaagggctccaggtagataccatttcaattgtttcacagtctttattttttttttatttttttttatttttttgagatggagtctcactctgtcaccaaggctggagtacagtggcacaatctcagctcactgcaacctctgcctcctgggttgaagtaattctcctgccccagcctccggagtagctgtgcgccaccattcctggctcatttttgtatttttagtagagatggggtttcaccatgytagccaggctggtctcgaactcctgacctcaggtgatcctcccacctcagcttcccaaagtgctgggattacagacgtgagccaccttgcctggcctgtttcccctctgaattgttctacattttaaaaccagcatattaaaaaatgacaggaactgaagcacataaatatcagctaatgtaagtttgaaaataaggcttattggcgaggcaaggtggttcacatttataatcctagcactttaggaggctgaggtgggaggatcagttgaggccaggagtttgagaccaccctgggcaagattgtgaaaccctatatttaccaaaaaattataaaattagctaagcgtgatggctcgcgcctgtagtcctagctatactccagcctgggcaagagggagaccctgtcttaaaaaaaaaaaaaaaaaaagagagaaagaaaataagcttattgtgtatgtgccctgggaattcagatttggaaaacatctgactgaattaacatctatgacttacttcacactacatattttaaatttttaaattaatcagatgtctgtcatatttattttatattatctttaaaattttttcctaaacagccaaatacatttttcaagtaatatacattcgtatgcatcttaaaactagaaatttaattttttcttctgtattgaccttaatttggaaaatatttatatgtaataaaattacgagatgggatcagaaagctttgttgctaaccttggttgttataaatacatttaaattgtatttcttctacattaagccaagaaaacaggctttaatagatttgttcatggagacatttttagtatcagtatagatttaagaatattttacagtccatttatgaaaaatataaatataaagaggcaataaccagactggtatttttactttactttgtaataatagtttatagcctattaataataacgtctctttttcttaaacttggattatccaatcagaccttcagaatttgtatattcaaagaagcataactttcacaggtaatttctatttattacaaatgtgcccttagtcaaagtgatactttataaacaagcaaatcaaaattaaaatcagcatttgaaagaagaaaattcagattattttaacatctaaaaggtttcttccataaatgaagaaaagttaagtgtttttccttctaaaaacaaaacttattttcagtataattattatatattgtttattatattctaaattctaattttcgaagattctttttcttcctaaagaagaataaagaaaagatttcctttttttttttttaagaaaaaggtaatgtgaactgaaacctaattctgaatttcaattaatttaggtacgaacattagtgagttttacataagatatttccttttaatatttatactgtggaaatggataatagtctttttaagaaaaattcataatcagtgttctctttaatggttataaaacattaaatgataaatgatggcatttctgatcttggatcctagaaactaaactaaactagatttttgttttkgtcttcagaaataaygtagggaaacctaacttatgaagtatatacttcttaaaataaaggtgagttattttcctgtttatgacttagataatccaggaaaggaagttaataaactgagtgagcatgaacgatccatctctccactactttttgaagagagtccttctgatgtgcagcccccaggagatcctttycaagtgaactttgaagaacaaaacaatcctcaaatactccaaaactcagttgtttttggaacatcagcccaggaagtggtaaaggaaattcgtttcagaattgagcagaaaacaacactgacagcyagtgcaggtatttaaaagartattgatggccactgtagttayaattttcagactggctaatttaagtgtaatattagtagtttctcattataaagtatatagtaacattttacttacttagtctttcattcaacttctaacaactttacctattcagaatagctgtgaacctagtaagtaaattggaattaagcagactatgagcctgaaggaaaaaaaagattatacgtttctttctttttttttttttttgagatggagtcttgctctgttgcccaggttggagtgcagtggggcgatctcattcagcttactgcaacctctgcctcctgggttcaagcgattctcctgcctcagcctcccaagtaggtgggactacaggcgcatgccaccatgcccagctaattttttgtattttcagtagtgacggtgtttcaccatgttagccaggatggtctccatatcctgacctcatgatccgcccaccttggcctcccaaagtgctgggattacaggcctgagccaccgcgcccgactcataaatttcatatagctatctttttctagcacaaaatatatttttattggttttgcatgtaataacttgagtattagtttttccttgggagacttcaatcctgtccaagattacattgcaggagagaacccagacggccacaaggtaagagacaaaagaaatactaactagcaacatagcaatccagaacaatctggtaaaaggaaaaacaaatttacatatgttgataacccatgaggccatcactgtctcttaacataataactgttattcatcatgaggaccctgaactatcttgtaaaagccatattgtgattaggtaaatcttttctttctacaccaaagcatgagaatgaataatgcattttaggaagatctatataacaattaaaatgaactgtttaatgaatatatttgaatatagctatttcaaattatcttaattaggactcctagaaattgtgaaacatctttttgaaaaatagtaatttgttttgtgaataacataaaaaggatacaccatctaattatcattattttaaatatactgtaaccagaatctttgattttttgctttatgtggataatctacgcaaaagacattttcaaagagtaaacatccaccctaaattatattctgtatcttttcttagagatagatatagaaccactataaaaacaatctgggctgggcatgatggctcacgcctgtaatcccagcactttgggaggccgaagctcgtggactacctgaggtcaggagttcgagaccagcctgaccaatatggtgaaacccccatctctactaaaaatacaaaaattagccaggcatggtgttgcgtgcctctaatcccagctactcgggaggctgagacaggagaatcgcttgaacccaggaggcggaggttgcagtgagccaagatcacgccattgcactccagcctgggcgacagagcaagactccatctgaaaaaaaaaaaaaaaaatctgtattcctactaaaggtagtaagtaagctaatagtaacacttaatattgcttagctcagaaattactcttacattttaaaatgtcatggagaattaaatatttctcatttttgctgccacaatgactgtaactagtacaatttattttcctaaaaccatagcaaaccctggggagatagatggtaatcaaatgttatttttaaagtagcattatatatcatttgagattttttgcaattaactttttttttctgttttgttattgcatatttaaaagtcatacatatcaacttctttgagtcatcagagtattcttcttttaaggcattgccccaaatacaatgttagcaaaagtatgcagtgataagaataaaccaaatggacaataccaaattcttcccaatagacaagctgtgatggacttcatcaaggatttacccattagaaaggtaagatttttacataaagtttatttatatatgtactctgaattctgaagagatactgtgtaggccaatagttaatcattctttgcttaaaagttttaaaataatagataaaagcaagaactataatggatgattgaatttggacttgaagaaacctttctatgaaaccataaaagtgagatttagcttatttgctataaacttttaagaaagtaataatcagatttttaagtgaactactgccaaggagaagggaaattaaaagaatatttctaacagtcctttcatctgtaacttagtgctatcttagttctaaagtccagattgctactagattaatgggcatgatgcttcaaagagatttagaattttaattgtttttgacagagaataaaccaaaatattttgccatttttaaaatggtaaaattatccctcaggggttccagaaagtgtatactttattattttttagagcttctagatttttctgcatatatacactattttttcagtaattgcactatgcactactgtatatgatgttctaggacttgcttttctcattcaacataatgtacatgaatgaatttaaatatttttcaatgctcagtatgtaatatgtaatgattactgactagtatatgtgaggagtagctgcaaagcagtgttttccaatatgtttttcaagtatggatagatattccctttaaaaaggttctggggtcagatacctttggaatgtaccattgatgtgtcactatgcatattaatatattaaaaattcataaatcttggaataaaaagtttcacttaaatttgtcaatcccaccattccccaagtttatatgacaacagcactccttttttaatgccttttgaaattccatgaaacgctagtttagtaaatgtggtcaaaaagtaattaaagcagttttcttgcatgacttgtgaagatagtcacattattcataccttttatcgatgataaaagatataatgagcactttgggaggccagggtgggcggatcacctaaggtcaggagttcaagaccagcctgaccaataagaagaaaccccatctctactaaaaatacaaaattagccgggtatggtggcgcatgtctgtaatcccagctgctcaggaggctaaggcaggagaatcgcttgaacaacccaggaggtggaggttgtggggagccaacttggcaccactgtactccagcttgggcaacaagagcgagactccatctcaaaaaaaaaaaaagtgtaatgaggttgtaatctcaatttttagcttcactttaaaatctattaataataaatattgattcttttctaggtttctggaataggaaaagttacagagaaaatgttaaaggcccttggaattattacatgtacagaactttaccaacagagggcattgctttctctccttttctctgaaacatcttggcattatttccttcatatctccttgggtctaggttcaacacacctgacgaggtatctatatgtattgtcattctgctttttcttcagcatttgctgcaatatcagttttaaccattgagatgaggctatatggataacatgttttaaaattctttcaggctagtttaattcaaaatataatgtttgaattagagtcaacagattggatgtaggaggaaagaaaagaagaataaagaatcactcctaggttgtggtgtcagcagttgtgtagagagacaagaggaatgatagtttcttttttatccctaccttgttctttgttcagaacctaagagaaatgccagtagtcaggttgttgtggaaagaaagatggccgtattccataattcaccctttaaggaaggagatgtaatgattcttcgaaagccttaaactacatttcttttcttttccggattcattcattcagtactgactactttactttgtgttaggcactattctaggcactgtagataacagcagcgaataggacaaattcctgccctcatggagtttacagactagtgtgagagatagaaaataaccaaataaacaaatgaagaaagtaaagcagagtgagggtatagaaaatgactggggggtaagtgtgagggttagcaaccatcatccaaaggcggagagacctgagggagccagccatgcaaaggctggaagagggaacaggtggaggaaataccctgggttttcttccctgccactctttcatctaggtcttaaaaagaggaaccctagaggtagaaggtaaattgttgtgggatagtaggtgaaaagaaggaaattttaaaagactgggaatcgtggaagtcaactctgggcactatttttacaattttgtcatcaccttgtcagcctgtcctcaaaatgactcctttatattcttgtatttaaactaaaggacaacaatagaaatcaatgaggatgcatataaaattgatggactaattaagcctactaaattttacagagattgcaaggcttgttgtgttgcttttctcatctcttcctgctcttcaatcttttgagtccacagttagctgactttgatcttcagtgggcataatgaaagatgaagatatcacagcactataaataattatatttgaagatagcaggaaataaaactttatttttaatccaaaaatttttttatttccatagtgcttgaaaacaatatagttctgatgtaacataacatatattaacttgtggtatttagagatccaggtaaggcttttacatgcaattcataggtaatttataataacaaataccaaacctgcctttccctctgtccatattctctattcccctattctgctttgctttttaatctgagtacttctcccattctaatccattccatatttactactatatttgttatctgtctttctccaatatataagttttctgagggcaagtacttggtctatttccttcattactatatcctcaagttctagaacagtgcttgaatcataataggttcactaaatatttggaaaatgagtactctacatgtcatttcaactttttggttttaactaatcctgtcagagcagctagaatacagccaaactaggtgattcagattcccaatcttcatcctatagctgtgtaccaaattctgactgaggttctattatagagtggtataaatgaataatgaataggctatgggagaaagaagttaatatactaaaccaaaaactagataactgattttaaattatttaacatttaattatattttgtaactggaagatattacgctatcacttcctatttgtttttataagttgtggtttttgatagtcaggtttttaatagaagcaatttctaatatctacctattttcaagtttgttctcttcaatagatatagacttgattcataatcatattagcatcttacctacctatgttctttggtgatttgtttttagataaaaaactgtttttcatgatgtataaattttaataaaaaatttgagagctctaaaaggtaattgataatgttaaatcctcttggttaactaaaaaaaactcagtctttgaaaaataaagacctttttttttcatttcaagggatggagagaggaaaagtatgagcgttgagaggtaatgttttattatttattgttaattgtgcataattcatgttattttaaactaatattgaattaatttttagtaaatatcactgaaataagaaatctatttgcaaattactataacagtttttagtagtttacactccctgcaataaatgccttagtataagactattattttcagttgctataatctcaaaaattaacttcagctattttttaatgttggttttaatcctacctagtgaaaaccaagcattttagaatttcatatcttaatttctagcttgtttataaggacaattgagtatttacttcggaaatttaagaagtaacaatgggaattcttcctaaaattctttcaacattggtgattaagcagaagcttaatcaaacagtaaaatattactgataaaagagagcttaaagatgatctagtttagtggtttacaatcctgtttgaaaaccaaatgaaataatgatggaaacttaccgtttggggaaataagtcattgtttgaaacatccctcaattatctcctcaaagcagcaagtttccactgagacatttaagaaacactgacctagggcccggcaaggtggctcacccctgtaatcccagcattttgggaggctgaggtgggcagatcacttgaggccaggagttcgagaccagcctggccaacatggcaaaaccctgactctactaaaaatacaaaaatcagcccggtgtggtcgcttaaactttaatcccagctacttgggtggctgaggcacaagaattgaacccaggaggtggagtttgcagtaagctgagatggcaccactcactccactccagcctaggtgacagagtgagactctgtctcaaaatcaaaacaagacaaaacaaaacactgacctagtacaagattgtgttcatatttcacatatattatttgtggtcagaaaagctgattaacttttacaatacaacataataaatggctttgataaaaattgctattttaggttttggtccatatgaaagcaatcaaagagagagagaaaaaaaaaatccaaaagcaaaatagtattgccatatttgataaatttctctgccattttctctgctattgggaaaactattttatgtacaggaatgtgttctccactttttttttctggaaactttctccccttggctttctaaaatgggcaatataacatcaaatttggtatgaagttgggggaaaggaggttgcaatttatatcacaaactaactaacttctctaatatagaaagaactcataatcaataaaaaggaacagtaagccaacagaagaaatgaacaaagttctaaataattaacagaaaaggaaatacaaatggctcttaaaacaagtgaaattactaccattttcatttrtaattaaagaaatacagattgaaagttctctcagatacctttctttcactagtcaggttggcaaagattctaacatactctattggcaagactgtaggagtgaaaaatgtgtaaactttagagggagtacattaggtttttttattgctattaaaacaaatttctacaaatttagtggctcaaaacaaaacaaatttattctctatcattctgaaagtcagcggttctaaagttaatgtgttggtagagttccatttcttctagaagctctgggagagagtccatttctttatgaaaagcttctagaggccacagaatctttggctcatagcctcagcaacttctttctctgactctaaccctcctgcctccttcttataaggacccttgggattacgttgggcacagctggacattccagagtaatctctgtccgtcagaatttaatcacctctgctaaatcccttttgtcatgtaagatactaggttcacagattccagggattaggatgtggacatctttagggaccattatctagcctaccacagggggtaagaaatttcataatatgtatcaaaatcacagatacacatgtactttgatgccataattcttttactaagaattaattccacagatttagtcacatgtcattttacatatatacagggttactcactgcattttttatgatagaaaaaaactgtaatatccatgaatagagaattggttaaattaccttacatcattaaattagaatattatgctgctgtataaaaatgaggaaatcatttactcatggggaactctcaccatgataaattgagaaaagcagggtactaaacaatgtatctaaaattctactgtttatataaaaaatgagaggaaaatgtcttcttgtttgcttattttatatatatacacacatacacacacacacacacacacacacacacacacacacacacacacacacacacacacacacacgtggaatatttcttttttttgtttgtttttgagagggagtctcgctctgtcgcccaggctggagtgcagtggtgcgatctcggttcactgcaagctccgcctcctgggttctcgccattctcctgcctcagcttcccgagtagctgggactacaggcgcccgtatacgtggaatatttctaaggaattcataagaataagaagctgacacattggttgccactagggaagagaactgagtagctgaggataaggttagaagtagaaaggggactctttactgaagagtcacttgctcagggtccatactcatcattctggtctctttgtattatcctcttttaagttaatatcacttgtcaacttctttcaacacttttttgcagatgaattcaaaatacctacatttaatcttatcagccttctattttcagctgtctattaaacaactctgcgtaggttccatgagccaaccccttaaatctacttaaagatgtttctcatccataaaatccatgtgcagtaattggaatgatgttctcatttggactttcttaagataatcttctgtaataaagtctatatatacatataccctaatctgttttaagttctggaggcattaccattatctgttggtaattttaattatcttttttgtgatataatagagcaagagcataaaattgtttctttgctaatcaagctttcctgtttaggtgggtttccattatttatatagatcttagatgtttttacttaattaaattttagttcatctgaaaactttattttgtaatacagaaaaatataacttaatgctagccatataaacatgcataccatttccaaattatcctggattatagtttactttgtgcgccaaaattattcttgtctttctaggacattcmgtgagataaataaagcggaagagcaatacagcctatgtcaagaactttgcagtgagcttgctcaggatctacagaaagaaagacttaaggtgctttattttgatatggtgtccttagtttttaagttttttaatagtaaaatgctaccttaaaagctagagttagattacacatttcttaaagatgaatacaaattaataaacgtcaraatagtgtattcctatccccaacagtcagatacaaatccaattctgacccatatctggagtctgtgatgaggtgattctatgaagaagcaccttatgagaatagagtggttcagtataattcagaggactttacttctgtacctcaggagtacatttgaataagttaaaaccaaagttacactggcattagagaataaggcaaaagaaaggatttccagagaattgtattcacatattacaaatgtctttccaatcatcctttaatgtttttcttacttagacaatgaccttctaaaataggcattttgtttcaaggttgtagtccaggttgcttaacacaggacaacaaaacctataaggctttgaacttgctattttataatcttcactcacaacaatttatatttagtgtattcccaacactctcaaaccagaggtagagtcagtacaaagcgtaataaaaaggtattttaaaattgctacacaggtacaaatatctggtttgatagaagaaataagacctagtgttcaatagatcagtaaggtgactatagtgtacagtaatctgtgttacataccagaatagctagaagagaataatttgaatgtttctcgcataaagaaaatacaaatatttaaggtgatagatatccgaagtacacttatttgatctttacaaagatcaaaactatgaggtacatgtgataatttactatgttcatataatgcatcagtaaaactattatgctaatcagtaaaaaatttgttttaaaaaaattactacaaagagtggaatatctgatgagtatctttctctatcataccttgaatttaaagaattttctttttaaaaaatatttaaataaacatttaattttatgatcattttagatttccagaaaagtcacaaaaataatagaatttcagcatactcctcacctggtttcctccattattaacatattaccagagtacatttgtcaaaaataagaaactgacatttaatacattgtcaattattaaccccagactttatttggagtttacttatttttccattaatgtcgtctctgccttccagaattcagtccaggggactacattgcatttagctgtcatgtctctccagtttcctggtctgtgatagtttcttagtttttccttctttttcatgaccttgacagtgttgggtagtactatacaggtattctgcagaatgtcgcccaatytgggtttgtctgatgattttctcatgattagatcagggttatggatttttagaaagagtatcacaaagaggaagtgtccttctcataacatcctatcatggggtgtataatagccacatgatgtcatggttgatattaaccttcatcacttggttagtgtttgctaggcttctccactgtgaagttastgtttttccctttggaagtaagtcagtaaatctaactaccctcagatgagagagagcaggaattaacttcctcctccaggggatactaaaatatacataacataaaatttacattttaaccatttttaagtgtacagttcatattgttttataaccatcaccaccacccatctctagaactgtttcattgtctccactgaaaccctgcactcataaaacactaagtgtaaagggaattcttacattaaattgtttggcatagcatctggcaatgcagaaggcacacaataagtgtgaactattcataagtcgttttcagtgagacacttttagaaagatttttttccttcctttgtaggtaattaatcaacctccaaaagagattcagtaaaaataaaagtgatcatttaacctttccctcttgtaatggtcttttataaaaattcagttggggggccaggcacggtggctcattcctgtaatcccagctctttgggaggccaaggcagggggatcacctgaggtcaggagtttgagaccagcctggccaacatggtgaaaccccatcactactaaaaatggtggcgggcacctgtaatcccagctactctggaggctgaggctggagaatcacttgaacctgggaggcagaggctgcagtgagccaagatcccgccactgcactccagcctgggcatcagagtgagactctgtctaaaacaacaaaaaaaaaaacaaacaaaaaaattcagttgggaaggggaataaaaattactggctaaaatgggattttaggtcaggcatagtggctcatgcctgtaatcccagcacattgggaagctgaggccagaggattgcttgagcccaggagttcaagaccagcctggacaacatagcaaaatcacgtctctacaaagaaaatgtaaaaattagctgggcatggtggcacgagtgtgtagtcccagctacttgggaggctgaggtaggaggatagcatgagcctgggaggtcaaagctgcagtgagccacgatcatgccactgtactccagcctgggcaatagaatgggacccccatctcaaaaacaaaataaaatgggattttagcttatgtttggaaagggaagtaaacgtttttggctaaaatggtattttaattattctttttttttctgagacagagtcttgccctgtcacacaggctggagtgcaatggtgtgatctcggctcaatgcaacctccatctcctggcttcaatctattctcctgcctcagcctccccagccgctgggattacaggtgcctgccatcacgctcagctaatttttgtatttttattagagacagggtttcaccatgttggccaggctggtcttgaactcctgacctcgtgatccgcccgcccaaaatgctgggattacaggcgtgagccactgcagccggcctcttattctttatgatatgtttatcaccatgttttataaataattggttataattccatattcttatgtccgtaaacctttctgaatttttctaacatgtaaatgacttttttctagaagttaggaagtcatacagaataatgtattctggttgggtgcagtagctcatgcctataatcccaacactttgggaggccaggatcgcttgtggccaggaatttgagactagcctgggtaacatagtgagactctgattctacaaaaaaataaaaaattagctggtgtactggcacgcacttgtaatcttagctactcaggaggctgaggcaagaggattgcttgaacccagaagttgaaggctgcagtgagctacagctgtgccagcgcactccagcatggacaacagagagagaccctgtctcataaataaataaataacatattgtatatgttatagggtagaactgttaccattaagttgaagaatgtgaattttgaagtaaaaactcgtgcatctacagtttcatctgttgtttctactgcagaagaaatatttgccattgctaaggaattgctaaaaacagaaattgatgctgattttccacatcccttgagattaaggcttatgggtatgactttttcatttttttgtttttccttaaatctgctagattttcccaaataatcaactttgggaatacagggggcccccaacttaacaatggttcaacttaatgatttttcaactttgcgacagtgggaaagctgtatgctttcagtacactcttgacttacaaggtggttacatcccgataaacccatcataaattgaaagtattgtaaattgacttattatgttttcaatttacagcgggtttatctggatacaatcctactgtaactcaatgagcacctgtattctcgccttcattttatttcttaaacctgtttacgaagttcttcctttgctgctgccatttgtcttagttattagaccctgatgtgtgaagccatgatcattagtttaattccagtaagggtcaattaaagttgttattttccttataacttaatgaaattcttgtggccaggtgtgtttcaaaattcaaaacttttcagattttagaaagcaaattcagtgcatgtagagtatattacgttgtaatacttctttgtggatctggggcaacaccccctgttcaaacacattaatatttctgtagcaaaacaaaatattcagagactgtaaagactgatgacattaatttagtcatcaggtatcacttgttgcttacaattttcagaactttttggattttggaattacagataaaggattgtgacattgtgaaatcacatctccagccactacatggtaaaaagtaacaagccatgtttccaaagtgtactggttgaaagtatatatgtggatcaccactccaaatgcacattttactagtaaggagtgggtcactagccataattttatttatgaaagatatagcacacactgaaatcaactgaataaagtgttaattgaaagagccaggctgggcgcggtggctcacgcctgtaatctcaacactttgggaggccaaggcaggtggattgcctgaggtcaggagttcaagaccagcctggccaacatagtgaaactgcatctctacaaaaactacaaaaaattagctggacatggtggcgggcacctgtaatcccagctacttgagaggctgaggcaggagaatcgcttgaacccgggaagttgcagtgagctgagatcacgctgttgcactccagcctgggcaacaagagtgaaactccacctcagaaaaaaaaaaaaaaaaaaaaaaaargcccaagagcagatatctatagaagcttaattcataattgccaaaactttgaagcaagcacgatgtccttcggtacgtgaatggataaataaactgtggtacatacagacagtggaataatattcagcacagaaaataaatgaattatcaattcatgaaaagacacgaatgaaacttaactgcataatgttaagtaaaagaagccagtctgaaaaagctaaatactgtgtgattccaaccatatgagattctggaaaaggcaaatatgagtaccataaaaaataattgattgtcaggagttaagaggggcaggaggtataaataggcaaaacacaggaattttagggcaatgaaatgattccgtatgattctataatgacacgtcattataaatttgtccagcgcccaggatgtattccaagggtgaaccctatgtaagctatggactttgagtgacaatgttgtggcagtgtaggtttatagattgtaacaaatgtaccactctagtgccacatgttgatagttggggtggtggaggggtgtgcatgtgtagggaaaggggatctttgggaactcattgtaccttctgctcaattttgctgtgaacctaaaattcctctaaaaaataaagtctattagaaaaaaaagagctaaagagtctgtatagttgactccagttagttactggtattaatttaatggtattatgtgtcacatatgaattaaaatcctacatcattatactaactccaaatagttaatatttaatgatattcttttataaaggaaggtaaatctgtacttataataccagctttgaaatgttacttatagtttctctctagccaaccttttgtatatgtcatagcactagacaaaatgtttttatgcattgtgagtgaattggctttgttcaatttgaaattgattgtgattggtttaatttaggtgttcggatatctagttttcccaatgaagaggacaggaaacaccaacaaaggagcattattggctttttacaggctggaaaccaagccctgtcagccactgagtgtacattagagaaaactgacaaagataagtttgtaaaacctctagaaatgtctcataagaagagtttctttgataaaaaacgatcagaaaggaaatggagtcaccaagatacatttaaatgtgaagccgtgaataaacaaagtttccagacatcacaaccattccaagttttaaagaagaagatgaatgagaatttggaartatcagagaattcagatgactgtcagatacttacctgtcctgtttgctttagggctcaagggtgcatcartctggaagccttgaataaacatgtagatgaatgtcttgatggaccttcaatcagtgaaaactttaaaatgttctcgtgttcacatgtttctgctaccaaagttaacaagaaagaaaatgttcctgcttcttcactttgtgagaagcaagattatgaagcccatccaaaaattaaagaaatatcttcagtagattgtatagctttagtagatactatagataactcatctaaagcagaaagcatagatgctttaagtaataagcatagcaaggaagaatgttctagtctcccaagcaagtcttttaatattgaacactgtcatcagaattcttcttctactgtttcattggaaaacgaagatgttggatcatttagacaagaataccgccagccttacttatgtgaagtgaaaacaggccaagctctagtttgtcctgtttgtaacgtagaacaaaagacttcagatctaaccctgttcaatgtgcatgtggatgtttgcttaaataaaagttttatccaagaattaagaaaggataaatttaacccagttaatcaacccaaagaaagctccagaagtactggtaagtgtgtaattgttttaaactgcatgattttctaggaatatgtattattaaaattaatgagattgttgttaaatctgaaacatatactattaaatgggtagtttgtgtatgccgccatttagggaaatgttggttacattgccataggttagaattaactcaagcctgtagattgtgaatttggggaaaactttggtttgatcttgatttagcacagaatgaactcaaaggtttaaggagctgagtgatctaatcaaacaaattccttcagagaacatctgtgaaggcacagtggtaaattaactataactgcataactagaaagcctctttaacttattttttggtagtgctgactctacccaaatttcaccaataaaattaagtgtaatgctaataaaattagtaaattacaaagaaattatagtttttggtgtgtttacatatgaactatatagtactaaggaagtttaatcaataagttttaactttttaaatttgtatacaactttttaattatttcatattattcattatggaatttcttgactttctttcctctaaaggtagctcaagtggagtacagaaggctgtaacaagaacaaaaaggtatggctaatttgagctttaataaagctggctacaatatgaaaattcaattattttataaattattaagtaatcaatattaaaaatgaattattttctagaatctcttcctgcattttaattgtgtgttccttttcattctaggccaggattgatgacaaagtactcaacatcaaagaaaataaaaccaaacaatcccaaacatacccttgatatattttttaagtaaacattgaacattttatcattaatttttaattgaaactagttattttataatcaatgaatttgttctttctgattttaagtttgcagatttatttagtgaaggcaagtgcaataatccttcctcagatgatgtttgcttttctaagatacatatactgattctgtgtatcttttttataaccatgagaattttacttccattatacatcaattggaaatcaatcctgttaagagataattcttaaaagggaaattaggaatgggataagaaggtgatttttttattatttttatactgaatataaaaacatttgtaagggctctcaaagattcacacatgcctatattatcataagaatttttcagcacttaactactttgttggcattgatcctagtgtctttaaatacttcatgagcattcataattaaaatttatcttaagttctatgaagagtattaatgtaactagcataagtggttttcttcaggaaaataaatatcacagtattatctgtgttaaaatggtttttgcctaaaatataatttttaatttggcttttcttatttaaaattccattatcttaygaataagcacttgaatcagtttttaaaatatttagtctaagatgattcaaagtagttttattttaatacaggacttttaaatggcagtatttcatttcttgtcaattatgttggtactttccacaaatctataaagaaggataaattgtaccatcattttattataatcctcaagagaaaatgtgtaattcaaaagattaatgtgtattaaaacacattatgtatcttagttacatttctatcagtacttttattaatatttgtgaaagaagacagcttaatagtagttagcttaagtagtttctccaagtacttttgtgctatcaatgagttcttctcaaaaaataattagttaggccaggcacaatggctcacacctgtaatgccagccctttgggaggccgaatgggcagatcacttgaggtcaggagtttgagaccagcctcgccaacatggtgagaccctgtctctactaaaacgataaaaaaaaaaaaaaaattagccaggcttggtggcacacgcctgtaatcccagctactcagatggctgaggcaggagaactacttgaacctgggaggtcaaagctgcagtcagccaagatcttgccactgtactccagcctgaagagcgagactctgtctcaataatataataatagttattatttaattgcaacatgaagttggaagccattttctgttacttctttaaggagctaaatcttttatatttttgttttctctccccttgcgtttcatattttagcttatgatctaaatatatattttgtatattataatattttaggaatagcttaattaagaactcacagactttgacaaagtggtaactagacttttaattactagattcttcaaattaggcttaatgcctgctagcatgccaatccaatcccatgactgatgttattatacactatggcaaatacaaagttgtagtattatggttcttgatggtgtgatttacttatgtaaattatgtacaaatttaagttcaatgaaacactgatttaatgtactgaaasgtaaatagtaccatagtgaattattttctgtcttgccttaggtttatttttattatcttcaatattagaataaatgctaaattattttcatttaaggatttatgtagttgaatattatcatttagtaatatttaatcatttgaaataaaatttaaagctttaattgatctaatagagatggttttctacttttccactcttcctccctcttatgccttcacttttgttttctgtgcccagaattttcttcacattctttactacctgttttgtctattatatccaacccattttctttttattataattttgatttggggcatttgaagaaaatacagcaaaactacaagaactggtaataagcatgcataatctcacctacttagtgaacctaatataaacctaatataaagaaccaccgtatttgcaatatatataactggtgaaaaactagtgtccagaatatataaatgatccctatgaatcagtaagaaaaagacagtcaatagaaatttggacaaaagactttatatggcatttcaagtgaaaggaaatccagatgaccaagaaacatgaaaatattcccagccatattaatatttgagaagtaaaaaataaaactacaaggaggtattacatctttaccttatttgcaaaaatgaaatgatctaatgatactaagttttggtgatgatgtcagctcttacattgaaaacaatcactgtggaaaaatttgtccctcagtaaatttaaagataaacatgctcaaaacctagcaattgcactctgaagtatacatctttgcaggttatctttcattacagttatttttttccctgtcaggaccctaactaatacaatgccttgggaaaactaatgaacatgtatcctaggaagcatgtacaagaaagttcttcccagtcaggaaggtggccaagaaaaaaattttttaatgttcatagcagcactgcaatatccaaaagttagaaatgaaccaaatattcagcaatggtagaatggttaaattgtaccatggcatttatattgaaacagtagaattctacacagtggtgaaaatgaaggaaatagctaaccacaacatagatgaatatcacagacatagcatagagcaaaagaagcaaatcacagaaggatgccatcaacatgattccatttgtataaagtttaaaacagtataaactgaacaactatattgttttaagggtatatagttatatatatgagatacaactgtaaagaaaagcaagtgttttgctgtccccagaaccagaataatgatttcctctgtggagaagtacagcagtgtgattggggagtggcacctggtgcttctgggatgctggcaatgttctatttcttgtcttgggtggtgattgcatggatgttcacttttaaaatactctttatacatatatattttatatattcttgttcatatataacctttataataaagagaaaaaaatggcaaaaactgctttcgttaacaagatgatattttcctccaactctgcaggctagctaatttcaatcgagaaaaaaatacatttttttcttctagaaccttgctgaacacagcaagaaagagccatcccatgcaaaatttttagtttttctcctagcatttcccctaaggctacagcctcaatcagtatttggtcttctttccaaagacagctgttgacagttagaccaaatatttttttgccgtttgtgatggttaatattgagtgtcaacttgattggattaaatgatgcaaaatattgttcctgggtgtgtctgtgagggtattgccaaagaagattaacatttgagtcagtgggctcaagaagcagatccaccctcaatctggttgtgcaccatctaatcaactgccagcatagctaggataaaagcaggcagaggaaggtggaaggactacactggctaagtcttctggcctccgtctttctcctgtgctgcatgtcttctgcccttgaacatcagactccaagttcttcagcttttggactcttggacttccaccagtgatttgccagggactatcaggccttcagccacagactgaagggctgcaccatctgcttgtctgcttttgaggttttgggactcagactggcttcctggcttctcagcttgcagactgtgggacttcaccttgtgattgtgtgagtcaattttcctaagaaactccccttcatatatacatctattagttctgtccctctagaggaccctaatacaccaccaaacaagtcaccagttttccagtctgtggtatttgtgtccccactccctaaattcttctctccaaccctaagtcaatttgttatattaggctttgttatttgcagtaccctatttctgtatcagttcagtcacaagcttcctggtgcctcttccttgttgagtcacatggggacatgcttaattctcccagaaatgtgtgacagcatgtgcaaaatattgccaaccaaggaagctcaaccaatccttggtgtccaaggtgtttactggaagtcagtcacataggcatgcatcacccatgtgactgaccttacccgttgagtctcaagaccccaggggtgtagtgatacctcatggcccagggcttcagccattcaaaaacagacattcgccatgattcatactgttagcataaactatctcgtcaaactaacaaaatgcagcccaaggcctcaggcatactagaacactattatcaaactggaaattccacgagctcaggtcatttcccaggagctagtcaaggaagggccagtacgtgaagacacctctctttgaaaagtgcagggctggagtaacctgaggctgctaggttaaccctttactgcattaatgtcaaattattagaattgtattcaaataaaatataaaaaagaaagatcacttagagtaactttttcctgcctcacttgaataatgcagagacacttcaaattcgtaacatgtttagggggtctcaaggaggatgggctatgcgttttgaatatatgcatataaaacaacaaatgacataggcctaataatttctttgcatgtgtataatcctctcttcaatgtaattcaaaggtctcttttttaatatcagtctttacattgtccctgtaatatagagctatacacctttcctcaatcttttgtgatagtaggaaaagtagcattataagaagtatttataaatttaattcactccaccagaaatgttttattttaaagttagcatgggacttgtggtatccgcaaggtcagtgtccccactgaagaagtggccttctagagtaagaagtttcagcatcaacatgggtaatggaagccatataacagaacttaagaaggaactttgtgctaagaaaatgtagacagtggttataggcatatatgtaagaaggctgtaagttaaaggcaagagagatgtagcaattaataggagatattttttctgccatcattaacaaatgtatttgtttactactccttactttttaactcatccaccttgtatccactgctacctctgccaaccctgtatctgttactgaattctgtctactcttgtagggcctcttgaaaatgaaaatatccatttgtttccatctcttttgtcaagcccttatcagttgtctaaactcttgactttccaactgatttgtcagttttccctgctctaaaccatcttatgcattttttacagattagctataaacagcattcccataatagcactctcatgtcaaaaaaaaaaaaaaagcagttttcaaaagctctcaactgtctccaagatttagcagtggaatgagtaggaaaagggagtgatttttagtgtatgattatttatgtggtgtaaatgctcccaccatgacagatttcaagttatgtgatgtcagccagttcacaaaattcctgaaactttaacagctcttgcaagccaatacaagctagctcctatatatcactgtccatgatgcactctaaacactggcttggcattcagggtttcctgaacagaccaagctgtttctcctttctggcatctgtgctccattgttccctctgcccagaatatgcttcctgaatgccccttttctctctcccacctacataattactcatctttcaactcagctcaagggccaccttcagaaaagtgttccttgccctctggaaaaattgatcagtcactattttttgctcctgtttccctacaaagaccctgaaacattctttgcatggcccccgatgttggtttctccctaccagattgtaggccccaagagatcctgggctatctttcacttatctctgaattccaagtatgaagtgtatggcctggcacacagtagatacggagagtcatttgttgacatgtaaatgaataaatagtatgtgtccaaaagtgtttactactatcttattgtttttatctgggaagacagaatggtggctaagggctgctgtcacactgggtcctaaagagtggacattccagaaagagacaattgcatttatttccctttattagataatggcttgctttatacatgttttattattatactgtgtcgttttggagtggcttgggagtatttggaagaaggcttaaaatatgactattaacctggggctaaaaaaaactgtttttgaggaaatatttcatttaaaaaaatcatacctggtgtacctggtgctgaactgttgtttttagagacaaggtctcaccgtcacccaggctgaaatacattgtcatgatcataactcactgcagcctggaactcttgggatcaagatcctctcatcgcagcttcccaagtagctgggactacaggctggtgccatgatgcccagctaagtttttgtatttttttgttgagataggatcttgctatgtggcctagattggtcttgaactcctggcttcaagcattcctccttcctcagtctcccaaagctctgggattaacaggcatcagccaccatgcctggccctggtactgaattttctttgaagtaaggttccattttgaaaagcagtgatatatttgaacacactttgtgttggtaggattttagtaaacctcacagagaggtgatgcttatttccctggagaaaaaactgttctttaattgtataattaaggactaatcgcttttgctttgtaatacataactgaattaagttgttcaagaaaaactcaaatgacatcatggtgactattggcaacatgattccatttattaagcaaaccataatattgaactgttccccttaccagtacgaggtaattgtgatagtcttactttgtaactgctgctgtctacagaatgctcagggagattaaagataattcagaggcaaatggtactaacccttctaacctcagcctgtaaagtgtagtatgatttcaaactctttcctgtatacacatacacacacacacacacacacacacacacacacacactacctctgccaaccacatacctatcattgagttctgtctactcttgtagggcctcttgaaaacacttctttccatttcttttatcaggttcttatcagttgtctaatatctggccttctaactcattgcttagctttcaccagtttctttccctgctttagatcatcttgtgcatttttgtagacaatactttcctaatatcactcatggtcttgggtgtctatggagagagtgagagagagagagattccctaaattggagacaaaaaggaaaaaaaagttgggtcacttctaggatcaaatctagttctcttttatgaaggctcaaaagttttttccctctcagaatatgctaaacttcaaatgtgatctctgaaaccatccgcaagtctgagatacgccatggttttttgggttttgctagcaattctgggcagagatcctggttgtccttcaacattctacttttctgccatattattagaattttagcttggcacatgatcacccagaatagactaatgtatttcatcaattctttataaaccactaagaaataatacctaagatagggagtctaacaggttaccactgcataaatatgggacaccaaggtttataccttcagagcaaggataaaggagaaatcttccatgaagaaagagggagcaaagtgtaggggtgggttgcccctacacacctgtgggtgtttctcgtaaggtgggacgagagatttggaaaagaaaaagacacagagacaaagtatagagaaagaaataaggggaaccggggaaccagcgttcagcatatggaggatcccgccagcctctgagttcccttagtatttattgatcatctgtgggtgtttctcaaagagggggatgtgtcagggtcacaagacaattgtggggagagggtcagcagacaaacacgtgaacaaaggtcttggcatcatagacaatgtaaaggattaagtgctgtgcttttagatatgcat

SEQ ID NO: 94210 - DNA, 54187 bp, Homo sapiens
  misc_feature (1)...(54187): n = A,T,C or G
ctgcattttacattcagtattgtttcttgattgcattaagaaatacactgcagccgggcacggtggctcatgcctgtaatcccagcactttgggaggctgaggtgggtggatcactggaggtcaggggttcaaggctagcctggccaacacagtgaaaccccatctctactaaaaatacaaacattagccggatgcggtggcacacacctgtaaccccagctactcaggaggctgaggcatgagaatcacttaaactctggaggcggaagttgcagtgagccaggattgcgttactgcactctagcccgggtgacagagtgagactctctctctctttctctctctacacatatacatatatatacacatatgtatatatatgtatatgtgtatatatacatatatatacactgcttttaatttacataaaaatatttatgatcatatataaataacaaaaccttggttttaattacaaaatgttgtttggtggctggtggatcaaatcaacgaggattagctagaggcaaactgcaaagacagagtatgaggcaatcaagaaaaacttaaaatacctaaacaatgacaacctgtgtaacagatcctggaagctggacaagggcaactgcccgtgtccattcccgctgggccaatcaatcagctgccagtcattctgccaatgttcaccaaggactgatgtgtcagacaatccttgagctgatacacagcagggacaggccattcctatcctctcttcacggagcatgcattctaatggggcgggggacacaaatgataaatgagataaaatayatatgacgtggtatagtgtcccccaaaaagatatgatcaagtcccaaccctgggtgcctgcgaatatgaccttatttggaaactctttgcagatgtaatcaggttaggaggaagacactagggtgccctaatccaatgccactggtgtctttctgagaagagacatggacacagggaaaatgccatgcaatgatgatgacagagagtggagcgctgcatccacaaatcaaggacacagggaaacgtcatgcgatgacgtgtcagagagtggggtgatgcaccaacaagccaaggaatgccacggtttgccagcaacaccagaagctgagaggagagcatggggcacactcccttacagccttcagaggatacacggccttgctgacaacttgattttggacgttcagcctctaggactgtgagagcatgcgtttgttgttttaagccacccagtttgtgacattttgttactcagctccaggaaactaagggagaaaaagcaaatggggaagggaaacgggatgctgagggttatgtttgcagtttagactaaagagccacttggacgtcctcactaagatggggaggagggaacgcatgtcaggcagatggaacagcaagtgcaaaggccctgaggcaggagtgtgccaggggtgcttctggctggtattgtttgggctagggaaagcgctgggaggtgagggcaggggaagaggggaaggaccaggggataagggacttgcaggtcatagcaaggttgttccattttgctgaatgagaaagccactggagggttttgagcagaggagtggcatggactgaattttttaaaatgtcaactttaaattctgggatacacgtgcaagacgtgcaggtttgttacataggtaaatgtgtgccatggtggtttgctgcacttgtgaacccatcacctaggcattaagccctgcatgcattagctatttatcctgatgctctcccttcccctaacccccaacaggtcccggtgtgtgttgttcccctccctgtgtcgatgcattctcattgctcagctcccccttattactgagaacatgcggtgtttggttttctgttcctgtgttagtttgctgaggatagtggcttccacctccattcatgtccccacaaaggtcatgatctcattcctttttacggctgcatagtattctaagagtggcatgagatgatttttaaaatagtaacatcttttttgttttttaaaaaggatcacacgagcagctgtgcagaatgtgggaaaccagctagaaggcactgctttaaaatggacgggtggcggggaaagaggggtggagggaggaggaggggtagcagttgggttctggttgtttcgggcagtggagccaagaggatgtgttcattgtggacagagagaggagccaggcatgaccaaggattttggactgagccattggaagcaaacagctccagaataacggccgtttgacttgtgtgtgattttctgtagtttactgaatgcacgttctaatccttggtcatgatttccacgtgtacaatatgaaggtatttgaaaacgtctgaaacattcattttcattactaaccaccaccacttgccccaaagcctttgtatgcaacacacggacctttcctgttggggcgatgtttgaagggtcaagtgcttagtaatgtctactcatctgtgctggagacgagggggtagcatttacaacacgcctgtacgaaggccaggtcccgttctacttaaaaggcttggagcccgggcgccactgggctaaggcagcttcagggccctggcccgggagtgcatttgcggggactccgcctgaagacagggcggcagccgcggggcctcacgtcgcccaggctcgcggggcaccgcgatgatcaacgacactggcgtttgctttggacctcacaggatgtgtggktggcgctgtattccaaacagtgccactgtcaacccggcttccatcgcgctcgggacaccgggatggcaaacggcaggctgtggatggcgggcggtttcccactgactcctgcccgctcggtgcagctggaaaaaccgaagccgggggccggacgcgccgcccaccagccgttcctcggctagcactgcccattttgcccagggaattaacttggaagttttcacttcacttttcgcatagaaaatcattttaaaaagcaaaccaaacgcctgtaagcagacccgctagggagcaggactccgccgcgtgtccttcccggctccggagcggcggagccagccacccggcacggcacgctggccgctcaccccgcgaggtgcagggagcacgtgggccgacgcgcggaccccagagagcgcagcgtgacctgctgcacggaccctcggatgagagacctggggcgggatctgcgaccggggcccgcccttacgtcaggagggagggccggccggcgggggaagcgcctgcggtggcgtccgctgcccccgcccggctgctcggaaacttccaccggcggcggtgacggccacgctgccctgcgcacgcrcagcgcggctcaggcggcagcccggtgacaccggccctagcgcgcatgtctgcacgccggggtctgcgcgccgcggcgggccgagggcggcgtgcgggccttccagccgctgcctattccacccaacgccggcctagtcagtaatggctcaacgccaccgcctctccctccagcccctcccagtcgcgtagcttctgacgccgtcctcaccccgcccgcggccgacggggccccaacgcgcaggcgcggtaaccacggcggcrgtgtctagtgaggatttgaaatcggtcgcgcgtgcgcaccggcgacacggcccggcgaccgaggccgcgcttcctcctgccgcccccgtccccgccccctcccccgcccctcattggagcggacgcggcggcggccccctccttcccccgcgctgtcgccgccgagagtgtcttttcaccgccgccgccgccgccgccgcaggagcgccgagccagcggcgcgagcgtgactgagggctagccgcacgggcggcggcgcctcccgcgggtccttcagccgctcggcgcctgggcccgccccctcggccccgccgcccgcccttctccgatggcctctccccgcggcccgagtggaacgccgccgccgccgcggcccccgcgcccgccccgcgccgcgtgaagcgggagcccggagaccgcagccgcccgctgggacgcgccaagcgccggagccgcccgccgcggcctgccggggcccatcaccgccgccgccgccccacgccggagcccgacgggagcgcggctagagcaggaggccggggctcggcccgcccgccgccgccgccgccgccgccgccaccggcccaggcccgtccgtccgtccgtgcgcgcgcggccgggcctcggggcgcggcgggggcggggccgcgtcggggcgggcgggcgcgcgggccccgcgggggcggcgcgtggatggatccgcgcgtggcctggatccagcccgagcagaaggggccggccaatgccctgtggatgcagatctgggagacctcgcagggcgtgggccgcggcggctcgggcttcgcgtcctatttctgcctcaactcgccggcgctggacacggcggccgcggcgggggcggccgggcggggcagtggcggcctgggccccgcgctgcccgccgcgtcgcccccgccgcccggccccaccgcgcccgccgcgctgccccccgcgctgctgacggcgctggggcccgcggccgagggcgcgcggcgcttgcacaagtcgccgtcgctgtcgtcctcgtcgtcgtcctcctcgtccaacgcggagtcgggcaccgagagcccnnnnnnnnnnnnnnnnnnnnnnnnnnnnnnnnnnnnnnnnnnnnnnnnnnnnnnnnnnnnnnnnnnnnnnnnnnnnnnnnnnnnnnnnnnnnnnnnnnnnnnnnnnnnnnnnnnnnnnnnnnnnnnnnnnnnnnnnnnnnnnnnnnnnnnnnnnnnnnnnnnnnnnnnnnnnnnnnnnnnnnnnnnnnnnnnnnnnnnnnnnnnnnnnnnnnnnnnnnnnnnnnnnnnnnnnnnnnnnnnnnnnnnnnnnnnnnnnnnnnnnnnnnnnnnnnnnnnnnnnnnnnnnnnnnnnnnnnnnnnnnnnnnnnnnnnnnnnnnnnnnnnnnnnnnnnnnnnnnnnnnnnnnnnnnnnnnnnnnnnnnnnnnnnnnnnnnnnnnnnnnnnnnnnnnnnnnnnnnnnnnnnnnnnnnnnnnnnnnnnnnnnnnnnnnnnnnnnnnnnnnnnnnnnnnnnnnnnnnnnnnnnnnnnnnnnnnnnnnnnnnnnnnnnnnnnnnnnnnnnnnnnnnnnnnnnnnnnnnnnnnnnnnnnnnnnnnnnnnnnnnnnnnnnnnnnnnnnnnnnnnnnnnnnnnnnnnnnnnnnnnnnnnnnnnnnnnnnnnnnnnnnnnnnnnnnnnnnnnnnnnnnnnnnnnnnnnnnnnnnnnnnnnnnnnnnnnnnnnnnnnnnnnnnnnnnnnnnnnnnnnnnnnnnnnnnnnnnnnnnnnnnnnnnnnnnnnnnnnnnnnnnnnnnnnnnnnnnnnnnnnnnnnnnnnnnnnnnnnnnnnnnnnnnnnnnnnnnnnnnnnnnnnnnnnnnnnnnnnnnnnnnnnnnnnnnnnnnnnnnnnnnnnnnnnnnnnnnnnnnnnnnnnnnnnnnnnnnnnnnnnnnnnnnnnnnnnnnnnnnnnnnnnnnnnnnnnnnnnnnnnnnnnnnnnnnnnnnnnnnnnnnnnnnnnnnnnnnnnnnnnnnnnnnnnnnnnnnnnnnnnnnnnnnnnnnnnnnnnnnnnnnnnnnnnnnnnnnnnnnnnnnnnnnnnnnnnnnnnnnnnnnnnnnnnnnnnnnnnnnnnnnnnnnnnnnnnnnnnnnnnnnnnnnnnnnnnnnnnnnnnnnnnnnnnnnnnnnnnnnnnnnnnnnnnnnnnnnnnnnnnnnnnnnnnnnnnnnnnnnnnnnnnnnnnnnnnnnnnnnnnnnnnnnnnnnnnnnnnnnnnnnnnnnnnnnnnnnnnnnnnnnnnnnnnnnnnnnnnnnnnnnnnnnnnnnnnnnnnnnnnnnnnnnnnnnnnnnnnnnnnnnnnnnnnnnnnnnnnnnnnnnnnnnnnnnnnnncagactcatttatcgtggagtgacttgcccagatcctacaagtaacagtccaagaaaaggggctgctgggtaggacctgcaggtatttgtcttttttactcttgagattggaacgggaaatcgactctctacccctccaccccgcctccgggcaagtgaggaaccccttgtcaaagtggggcgtagataagtgtggagtttcacgtaagttaagttgcagaataatttagcattgccaggaactcgaatcacgtcgaaggtaaatattaacctttttaatttcattttttaaaaaaatttaactgtcaacttagaggtgattcattttttggggggtgttgtgtcctttaattttgtgctgcaattaccataagcatcgcctatggtttataaacattggcttaattcaaagaaaaaaccagatttgtcatatatgtctattctttggaaggtgccatttttattttaaatatttctacatccgcctagagggaattagaggctctacttaaatttagtgcacttacagacggcaaggaatgaaacgaaaggtggtgtgtgtttcggggttggaattgtcccaggtgaggctgttcaggtgtgatgctgttgacgcagcccctttgccattttgggcttttctgagcgtctggaagcaatttatgtgtaggttgtatgtcagtattttaagacttaaatgataatttttccttgcacaatttttccccccaatttaaaaaacaattaaggatttgctggggtatgagggttgttgcatgcagtagagtcctacaaataaccacaattgctaggtgttgggagttcttatagtaaacttttgcttgtaactctktttctcatttgaagtatgttgggaaacacgagttgatacttctttaaagcgtgtgatacactgtaatagctgcatgttctgtaacttatttcacctggcttgggctacaagcgataccttctaaatttcccgaagtgtaaacatgcagtgcagacgccggcaggagcgcagactcctcttctctccctccagttcttacctgtagaactttctgagagcaggtggttgggagcagtttcttcttgatgaatagcaatayatacctaagggctcgcttggggaggacctttaggtttccagcctgttatgtaactggaatggactccgtttctcttagcactagaaaaaacaggaagacacgtggtctctgccagtcttgggttgtacctctgctcttagaaagtggtagcgcatcaggtcccatgcacctcacttgggctccccgagctgtttcctccaggtaactctagtcaggctcagtaggtggtgttgcttttgttagtgaatgagcccactaggatcaggtgctgtgctaggatctggggatctggggcagggacggcatgggagacacagtctcatgatcttgacccaccctgaaacctgcctgcaagtgccccctgcctagagcacaagagtaccctgctcagttgtgcaggtcccctctcacgctcttcgtcacccacgtccagtctctcatcacatgctgttcgtttggcccttttaatctctccacacctcatcctccctcatgcaggctcttgttacttctgtggagattgctcaagcagccggaggtgcctttgatgcactctggtcctgcttgagtcctttcccatcacaggtaatggggcaatcttctctgccagcaggtctggtcagattccccttcaccctgtgatgtcacctcccccatctccaatcccccacattaaagactaaagcctaaaactcagcaacacctccagggctctgctgctcagatgcccctaggtcctggctcctggccccaccccttgccaacccgttagaacctagctgtaaggcagtatggtgtagggcatgagagggctctgaagcccaccaggaggtctggtttgatactgcagtcatgctcttggaactttccttttcccctttgctggagacctctccttgcctgtctctgggtggtgtgtaccatgcctccagtatggccttgggtgcatccgcttcctgccgtctctgcccaaaggggcctgtgaggaccacctgctctgtgcccagaagggcacggtgacctctgcttgggctgctattccagctactctttcagaagcaaacctaagctgtggtagagttgggcctgtggctagaggaggtaaggtcccccctgtgatcatttccacatggcctgttggtcctatataaactaacctttttgtatcaataaatagttctgtctagaacttgcttctggccatcagcttacccagagtgttgagaaaggccaccaaaaagtctttcggttgtggcttagctaaggaaataactgagttttaaaggctcacctgggctggccaatagtaaaggaccttgttgstgagaagctgcttggggttgtgatatagtcccaggacatgcacttctgaaaatgcagtgtgtattcctcatgggaggatgagcctgctgtggagcattggctgaacccagttgggtctttgcctggtagcccatgtggcaaccctcactrtttgtccttttctggggaggagttttctgcccttggacactttgcctggtggcttggccttgtgagactgccagtctgccttctgcttcaagtaggatgaagaaaaagcaggtgaaagaggacagggattggtgcaagaaccttcagaggagaggaggtgaaatgcttcttttggctctggttcttgaatcattgtttgattgaaatctcaagcctttgttttgggagtggtgtgcttagcgtgagctgtgctatctacctgggcttctgacctagagatgttgggcaggtgtttggacaggccctgggccctttgcatcccagcctctggctgctgtcacttgcaagtgctctcatcccctgacccagcagggctttgggctgttgttactttgtcatggtcgttctagcagctttggaaacctcttcaggttaagagtcttgcataagtgagagtgggagcatggccctcagatatttggccacatccttactggtgtgttacagagacccaggaagaatgtagttgaacgaggacacatgcaggtgtcccgggccctgaacagcttctattcagagtttggcctttcgaaggctgtgccatctcaggtgtgcctgcagtgtgcagcaggtgtatgcagcttcctctttgcaggtttcttggtatttaatctcatcctttaatatcttctattaactcaaaggaaattctgttcttagtttgaagtctgagagagaccgacgactgtcggcataggacatggtcagccatgccccgcaaggcgtctggtgagagtcgtttccaacttggtgcatgtttttctcaattctttcttgcgaaggagtcacagcttggaggcgcaaccaggatcccccctctccctctagcctgacctcactgacataaagtagagcaggtgtgacctgtccggaacatccttgtgatgctcagcagggcctgctgcagagcacgggaggcatcactctaggggcctttccctcccrtactttcctgtgagtgtccaggatgcatgagagaggttgttgtgagacctgccttaaagggtggcggtggcacgtgtggaccttgctttctgagtttcactctcygagtcccagaggtataagcttgtgaagagaagcgtgtatgtatgatcacactaagcagatacttgctcctgcactgttggaggaggaagaggagttaatttcatcaattaactcttccaacactccttccatttagtaatagcatcacttgttcctgtcttttgttccatggccaagctccacaaggtgaaattgaaaatcgagtgcaagacactggctgtgctggagttgaggaaagttttgctggagacctgcttgcaccatatgtctggtcactgatagatgaggactggccaggtcaggacagctgacacttggagaaggggctgcccaggagggcatgacagactctggaaaaggagggtcggagtattaaactggctgggaatgagaggcctccaatcttttcgcaggaaaaaaaaaaaaaggcttaatgctcgtgctgtggaagtcagaatggagcaaagtgggttctgtctgtcttgctgctgtgagygtgtgatggaacaacagtgtcatttgctttttctcagaaatatttaatgcatgtttgtgacataatttttcaaagtaattttaagtaaatattttaaagtaaaaagttctaagatttgtgtctcaaggtaaagtctcaaacgttctttggtcactatttaatatgagattttgtcctcattttaaatggattcatgtaagcgtcctgtggaagaagagttaatagttatccttggaaaataagaactttttatgcctcagttaggtcatatggtttaggatctgattttgtagttgtggagtaaaggttaagaaaaaaaaacagcaaaccttgatattcaaattcagaaacttgatttttgaggatgcaaccagaatttggactaaaggtacagaggggtggcagagtcagaccacccagacttgcagaagattgaagaagccgcagtgctgccatgaagaggccctttctaggaggtgtggctggcttgtcagtgctttgtcttctctgcagtgaattggatggcaagcctcgccctcttcgaaagctgccactctgaacctgccttgagaagcacctcagggagggcaggcaggtggtctcagtcagcgctgacaggtgtccaagttacctgacctgttgggaacatgtgcctgagtgaggtggccaggatgccttttctcccaacactggggatgcacactcgtcagcatcctatttttgagatttctatgttgtggtagttctctgttgctgtgtagcaaattarcataaactcagaggcttagaagaacactcacttatggtcttaaggattttgtgtgtcagatcagggatggcggggctgggttctctgcttaggcttttgcaaggctgaagtcaaggtgttggccagctgtgttctcagctggcactcagggtcctcttaccagcacattcctgttattgtcagaattcagttccttgcaggatggaagtccttgattgcttgctagctgccagcaggggaattgggtagggcgctgtcagcttcttaaggccacctgcattccatctgcaaagcaaggtactttgaatttctctgatgttttccgccagctggaggaagccccctgtttctatgggcttgtgttattgagtcaggctcctgcagataacctgcctacctgaaggtcatgtagtagtacaacatgatcatggtgtgataacctcatcagagccacaggttccaaggagtagggtgtaggaccttgaggggaggaggttcttctgtgggtagacttcccctggcatagaatccgttgatgagcaggttgtggttcttcttgtccaacacttttcccctgactggactccagcccatcgcaatgactcttgcagattgccagttccgtcctctggcttggtggttactactgaactcaggcagccactataaccaggagaacctttctgtgctgcactcagatgaacattctttaaaatatgtcatttaagaaaagtttgcaggactactcgggaggcagaggcaggagaatcctttgaacyggrgagttggaggttgcagtgagccgagatcgcaccacagcactctagcctggtgacagagcgagactctgtctcaaaataaataaataaataaataaataaataaataaataaataaataaaagtttgcaggaaagccgtgtgaatatatgaaaatacagtgattgaaaagtcctgttcacgaggtgtcctgcattggctagyttaggaaaggggtctttcctatgcaggtgggggttgatgacttacccaagagtcacctctggaacccagttmtcttaagttgatagcagtctatctttgctttgcagaagatgtggggaacacttgtcctgcaagcccaggttcgtagcartgttggcttccccagaaccttggcttcagagcactgtgcctcctttaggaggcacaagaaaactcccacacggttcttccctctgtcccttcctgagccccctgagtgtttggctcttgtggagttgctgctattactaagttgatcccactgccctcctgagtctcctcagggaaggaggggctgtattgtagcccgcattcttagtgccaagcacacggtagccactaagtaagtatctcccaagaaagaagagcaggaggaggatctgccaactcaggagagcaggtgggggatggcaagtcttcggagtattcataaaccaaatgctaagggaaacttttgttgtttgtcttagaattttaaaaaataaagtctgttgcagtttatctgctttccttcctggagagtggctaaactagtgttctgttttacaatgtagaatgcaaaagcagaaaacattcaagaaaattctatactgtatttgaaaaacatcaccatttagttttaactgctctttgtttcttattataaaaattaatacctaactatgaaaagttagaaagcctggagaagtatggaggtgagttgtccaccattgggccactagagagtgccctatgagcctgtccstggtgtcctggactctggtggtgtgcactgcatttgctggcagtgagccagggggtgggccacatctgggcccgggcggggtggatctctgcagaagtttatccatctcttggctgacagggtgggcgagatgggagcagctctgagggtccctgttggcagagaatgtctttgattatcaacaacatgcctttttgttgtgggcttgtgatccttttctttcctaaatcagctgccgtgcataaccagttaggctctcctgtggcttcagattggagttagtttcccaagtgctaggatgtgggtgttaggtgatttctgtctttccgtttgaaagagatttcagatcattgtaacatttctggaatcctgtcgatctgaaggaatggctaggatgtagtagttyaagggaaatgaaaagtcgaatgtattttgatgtttctgcatcagacctgctcggtggagtccatttctcagcttcgggagccacgtgcttggctcttgagagcctagctccatcagcccatgtcacacactcacaggtctggctttagctggtttcgccatggtttctaacttgagcctcagyttccccccctgtgaagcagagcctgtggcacccacctcagagagtacatgaaagacttggaagcactctgtgagttgtcatgcgagagattaaaaaggccaccgctgcccttttctcctctctttaaggaaattgaaaccaaaaattaagtccttcttgccagctggacaggaaaagcctttttcttggtttttgaaaatacaacttccactttcagaccaaagtgaaaactgctaaagactgaatattctgagtcttgggagtggggggctagaggggtgttgtgaattgaaagatacctttctatttttaaaacattttaacaatgccttaatgatgaataatgtctgttctagttttgcatttgttagttttttttttttttttttttttaactgttctgaaggtacatcagcactgttctacagctttaaataagaatctcatctccccagaggcaagggtactcttgatgtatttgctcagggctgtatgtgctgctccgtgtaactcatttaaagttggttaaggttttttttatttcttgcacatagtagaaggagtggatgaagtgttttctgaactctttgcagcttctaacatagtgttctgtgtatagtgaaggaaaacaaaattaagggccagggaacattaagtaggcaactrgaacagcactgtccagtagaacttcctgtggagatggaataattctatttttgcactaatacagtagccactggccatatgtgacttttgagcacttgaaatgtgacaaatgcaactgaggagctgaattttaattttatttacttttaattaaaatttaaatggccatgtatttagacagctctgaactgcagtaactttaggctctatttgaamgtgtttgattcagtaactgttgctgaaataaattgaaactcatacaacagtaaaagctgtgttactcagcaagttatcactgtgaaagctctagaaattgtttgagtttccaatgcaaatccttttcaaaaagccgctgttttaatagcacatgaagcataaaataggttcatagcagagcgcagcacagagcaacatggagcaactgttatgacctggagtgtctccagtccagcatgcaggtgataggtctcagcrtttttgcacgcaggttaatgatggtgcagacggtcacttccttctctcaacagtcttcctggtcacgagcaccattgtggctcatgtgtgtggggctcttttggcttagctctctgcaygagtttgctccttkagttcccagagctgacccttgaaatgagtgatattactcctgttttgtagacagaaaactgaagccttgacagtctgacgtgacctggcaagaggtgctgcagttggaaatgtgaattcacggctgacatctgggcactttactcctaacagtgttcagtgaacaagacgtcgctaacatgcgggggatggaacctagcaactcattctacaaacatggttcaaatatgttggtgcagggccttttgctttgttttcctaaagagattagattcagatgtggtggggtgctttgacagccaccgcaggacaaagttgatagctgtggggttgcggagtgttgaggatttcatagggaagccagtcctgcgcagtagtacgctcaggttcrtgctttcttgaggtgttccagaactggcctggagggaggctgcagtgtggaagcgggatttctgtcacctggagtattcttagaagttgcattctatgaagagtggagcatctgatgagctgtttactcgctgtttcatctgacggcagttgaaagacaaggcaggactggcagcgcagctgcctcagtcagcactgctgcactgggggcttgacctgcagtctcgcaatcctggactataactcattttgaagagagaaaaattaagcattaagtgattcaagcgtcttgcccaaggcgctactagaaaataaaggcactggtgcccagatgcaggtctgcatggtatgcaagcctgggcttcttcccacctcccccacagagagggcactggtatgttggagtgaagagccacgcaagacctctgtgaatgggcagagatgggccagtgacgcaacacagtaaagtgtattttggttataggcatcgtctctaaacttatgtaaaacattattaaaaaatggawggacaacgatgaaatgatggccaaaaatatagaaaaggataccttgcatgtcctgtgaaatgcaaaggaattctaaagtgtcattatgagttacctcatggaagaaagcaaaaggtgaatctatctagagtttgtggttctgactcacaagagactgatgttcatgctgaaggacgagtgtgacaggtggaaggatagagcaccgagaccacactctaaagggtaggaatctatgggaactattcagggagatgaaagcatggaatgaactgaagcttgcagactcgttgagtaaaaagcgcgttttaggattggttttagaataaaataacaaggcctgtggttggggaagatgacttgctgttcacagagcctcccttaataggtggggacctcagcttttcctctgctgccatcaggtgagtggtgtacagtcctagccacagtagtaatcaccactggcctgactgagccctcaccctttatacagtgtctcctgccaccctcctgggagaggctgttctcggcacagctggcctggggtcacacagctggtaggtgtaaagcaggcattggagtccaggtagtctcactccgtagcctgtctctttagccactggaaatgtagagcaaagcgagaattgtccaaagagataagctaataaagaggaaaacaggctgggtgcaatggctcaygcctgtaatcccagcactttgggaggccaaggagggcggatcacaagttcaggagatcgagaccatcctggctaacacagtaaaaccccatctctactaaaaatacaaaaaattatccgggcgtgatggcaygcacctgtagtcccagctacttgggaggctgaggcaggagaatctcttgaatccaggaggcggaggttgcagtgagccgagatcacactactgcactccagcctgcgtgacagagcgagactccgtctcaaaaaaagaaaaaaaaaagaaaacaattatgctgagttccagagaagtgatgtctgtcttctcaggagagatgccgatgctgtctgagggcctgcccagtctccacatgattcagagactccagagatggacagctagtgccctgattttcccaagaggattctgagggtgacttctgtcaaccaaacaggaggacctggtgctgtcatcaccagttgtagagaggctgcggaccacctgctgtgtgtgccatcttacactgccatttgctgattgcttcaaagctagaggttgtttctaagagtgcttcgtgctaactaactaaaacataatgacattgtttttgtaaaactgatccgtggtttgttttttaaagcagaaagctctaaagtcactcagtcccaccacccagaagcacaagcaggtggctgccactgtaggacctctctctctaggctcgtgtagatggacacatggattggtcagtagaaatacttttattaaaagtcttatctttacataaatttgccaaattattaattttgcttgaaagggaaaggtgtccaacttcagttggaaatactagtttctaagagatactgctgagactaagagcataaaacatgatgaaaaccttaagtggctaagtgcagcaacgtcagagtaaaagctttgatgaagtcttggtttgcttgggctgtgtaggttggaggctcagcctttgtttctccctcctctggtgcccagtggtggtgtttgtgtccgtgaattttcaacctctgtagtttgtttgtagttatgaccactgttgcaccgaacccttaccgagggccaggccctgtgctaagcacttgccagtgtggatttattaagtcttcatgacagcaccatgtagggggagctgcgtccctgtgttgtacttgggacgcgatctgacctcaggcacttcaggctcctgaagggtctgcagtctcgtctctgcctgggaaaccacgatttgcagcatattccacagacctcatgctcatcaycaggakgcttcccgggactgctgcctgagatttctaagttcctaatgtggttcatgcttctggtgagtttctttgaggcraygccccctgcgttgcctctggtcagctcagtcctgtggtcctgcagggcatcctacagtgtcctctgtctgtgacttgtgccgygccaccttgacctggcatccactgtcctctaccgcgtttgcagataggagccactgttggtgcctttttgtcgtgtgtgttgaatggtcagggtcccaaatagctgattgggagcactctccttgaatctgccatgtgcctgggtctcaggtgactgggcccctccttgcttcagaacccacgtgcgttgcctgtcctctctggcttggagggttgtgtggaatcagaggtgagacccagtccccagggatgggcagttgcctttgattgcccagctgtcctcagcgccctccctcctgcgcccaactgctgtctcagttgcttgcttgaggatccggatatagactgaggtcggccttagcgtggcggggggttttctcttgagtcttggatactttgttaccggtcccatcttcctgtgggtgggagtgtctgtcttgcttggcccagcctccyagagaccttagctctcttagtacatgggctctgcctaccttgatccccagctcaccaccctagtgcagktgcttcttcgctcttgttccactccttgtcgccrtccaccctgtgctttctcgatgtgtccttactcggtgtttctgtggagcagggcatcctgggcttcctttctgatccctggctcctgtgatcttccgtgctgggctccctcttcccttcccttttccactgtgttgccctcacacagctggcrygccatggatgtcgctcacccaagcccttcctaatgttgctcaccaaaacccctcccaccttgcccctgggaccttctccccttccaggctgcatgcaggccgagggcctggcgtctcagcaggaggcagtggggcctttgctggcacctgggctctgcatcctgaccttctgagggcttggtcctttaggtccatcttgaatctcctccaggcttcggactctctgctctgtagctggcccatggagacgggtacactcaggcctggtcttagactccgctgcttgggctgtgctggtgcctttggtgccctcttagtccatcccacctgggggccctgtcctgctgtccattgtgccagagtgctgtccccttgtctttccgtaactggctgctcgttacctttcccatctcagcctcagtaccagccacttggtatcagggaggctctccctgaccaacctaaagttcacagccgtggttgccagtttaaatttctgcatagcaactttttggtttattttggctacttatcttccccatcatgccccctgtccctcccatataaactcagtgagagtaggggccacatctcatcatcctgcccacagctctgctgtctgtatcagccagggtatgctgtgcagaggctcacggtaaatagctgcagaccacgaatcccatctgcttgctgtgctttaatattggcttacatctttggatccagtgagttcttttctctgtctccctctctctcactcgctcatacttactttgtgtaattggtgatttccagccttttgtatagtcctttctcgaatagttgttttctgtcatcttggcgrgggcctcaaggggttgactgtacggagggcaggggctgcagagctgcagctgctgcctggggtctcacggcgcccgtgaggtgtaggcaggtgctttgcctctgagctgtctgtagaatggggtgacggcggtttcatcagactcagtgaagcrtgtcatacagtgagtgtctggtcacagcaggmagatggtgaatgtcagctaatgagtattcatcaccaatgaatagtaacagttttttttactaaggctatgtaatgtagcctcagaatyccactcagcacagccccctggcagcggtgcctctgagagctggcatgatggagagagcctggttggccttactggtgtggttggggcacttgggagaacgccttcctcacaaagctcatctggagggttttcggacttgtaggatagctttttcaggggccttgcctttggcagggcagggacgtgtactgctgcagtctagggtatgggataactttctaaaccagacccagaacttcatggccgmaggggccttttagccatgcggggctaggagctgacacagcgtcagcagcatgagggcctgtggtgctgggcggcagagcccagagggagcccctgctggtgtgactttagtgtaaaggctgggggataccagattcttacagaagacttaagacgggcacagtgatgtctgctctttgacccttgcagtatgaattagtaaaactgaaattattacatttcctttattaggattataaaagcaatgatgacttattgaagaaaatttggaaaatacagaaactacctrtaatttttccattgttaacatttgagcatatttcttgtcacttttaatggtgctttaaatatgtagcaaatgtatcatttcgtattttaaaaaaatgctaggtaagcatttcctcctgtccttaaaaagctcttttaaacaactttaaaatattgtatagatagatgtacacaattttctgaataattggagttatatttacatcttttcactctttaggaaaggactggcctgtttctgtgttgggttccttcctgagtgtggcttccagctcagtggctcagacttcaagatgaagacttcagtcctggttgtgtatggtcttgggccagttaccatatgtctaatgaatacttagttttgtcatctacaaaatgaaaatagtaatatttgcctcaaagactattatttgggaggatctagtgcaaatgttagtaatgtggatattgtgtagtgtcccaggatattaatgtttttagcctcttggcttttattctgtattgttgccccaaaagatgatgctcacttatctttcatccagtgtaaggatatctggaaagacaacagaaagtatagctgttttcatttcaaaagtgatcagctgcttgagctagcaagcaaggcttgcactagcttccaggcgcagtcacgcagtttcacagcaggcgcggttccctcggagcacccagagctgccctgyggtagtcagcagttgtkctgtggctgcactgccaggctgggtggcaggtggatcggagccagcagatgtggctcaggaagtgccttcttggcctctccttaatctctttcagagtctgtgggcccttgattgcactgtgggttgtttcagactccagtattaggagactgaaccccttggtggttttttkgtgtgtgtgtgctgagctgggttgaggacatgttaagcaggtggggtgcctcccctgggtttgctccgggtggtacctgtggtgtggggtggttctgagtagttctggccccactgctggagtatctgcccactcagtttgtgagatggcagggcttcatcctggtctggtgcctcattttcttctttagcagtgggcttagaaccaatgcagattcccaagttaagtattttttctgtagcttaattattacaggcttctggtacctaagccctttcttactttctgttctgaggggaagagaagataatgttgtttctccgcccccccccggagtggccccaggaccttgcatggcatttgcagcatttgcagcgtgcttgggtttgctttactagggtgaaagtgttgcaccccccagcacccacaaaggcacctctgctcacmctccggtgaggttctgactggccctgggacatcacctgctccaggatcctatgtggctcatcccaggagagatgtgggagggaaggggaaaaaaggcttacatttgctgagtggaattcatgtagatctgagttccgcattgattcctaagctgcagagcccttatgccttggctgttttgtgaatgttagtcggtcttaacctttttcaccgagttagcattggctgtctcaggaggctcacagctcctgctcctcctccaggggagtgcgccctcctcctctgtcggtagctgtcaggtgcccctttcctctgcagcagactgtcctgggtccttgcctggccttccccttacacgtgagcctgcagcttcattcacagcccctgtgtagaaagataggcacatcgataggtccctccctgcccagagtgggcggaactgaggcaggcactaaaagcagctgactggcagccctagaaacatgaagggtttcatttatagtttcagtccttttccttctttcgagccttaatttaaaaaaaaaaaaaaaaaaagccttgaagtcctgcttctgagttttctaatttgtgcaggtattagttgccttgtawcataatcaaaaakaaataaaaatgatttataattagcttattaactgtatcagtaaatggatactttaaagaggatcattgatccctcaaaatagaagcaatgcagtcattccctcattatgctttacttgtgatttgcttacaacccactcttcctagttaaagttaaatattaatccagaccctatcagtgcgatgtagtagtgtctgaatcagttgttgttttggtgtaatcgtatcaaagcatgttataaaatctacaaaattgcagggttaactccaaatattttcactaaggtattgtttttttgggcaaaaatgcatagtgaacattgtggagctgaagtgagggaacttcgatttctgagaaaccactagttttaagggttttgaaggaagagttggaggaggagaggaagagaataaattcacagttaatgagtttccagtattttctgtcgcattttaygttgtaatggaaaagactgggaactgaactcacatgcagtttgtcaaatcactttttccctagmattcaggattgatgagattaacggggtgttaaaggtaaactgaggcacataattaacatggacagaactgtagacctgagtgttgagagttgggaaatttcagtgagttgggaagactggaagcacctgttcttcagagtgcaggtcctcatattcagtgggtttaaggtgctgaaactttttttttttttttgagatggggtcttgcactgttgcccagactagagtgcagtggtgtaatcaccactcactgtagcttcgaatcctgggctgtcagcctatcctcccacatcagcctcctgactagctggactgcaggcctgggccaaaactcctggcttgaaacttcttgtaaccagattggaggaggagggcatgttcattttcgtgacgtttcctttcccttaaacatccagtgaaatctgacctttgaccatcactttgcttaaaagaagctactggatttaaagtctaggagaatgtcctagacaagcccatagtatgttcctgtatgttccccacccagagacctgcgttatgaagtgtttggtgtgcttcttccagccccactgttctttctaaagtgttttattttacatacgctgtcctggcttctgggctatgacctttgcctttyttgccstttagttcctttgccctttacctactgcagtgcagctgcctgtccttgggttgactacaaagaagtcacctttgaacaacttagaaattgtgmcttttggggaaggcagggcagagccttggggctgagatsggggaggagccagctctgccctgggagagatacaaagcgcctgcctgggtgaggcagtgcacgggtgggcttgcytcacctctttggccccagcttcaaaaccagccagtcctccctggctttggctttaattcacatttacaagcttgaaaaccagttaatcccattagctcagcttctaaagctgaaaatcgtcccctaaatgggtcacctgttgtcatcaatagctttattagctatggaataatatagttttgttctctaactgtaggatccttcttttgctcttaaaatagctcagtaagttgggtctcataaatacatacagcaagcatataccagatactaaaatacaaaaacattgctgatcttgcttttcagtactaaaagcagaaaatcgggaatttactaaattgagaagtcagtcattacctttcgatgggtttggactcttgcaaggcagtgattgtaaacgagagtgatcttttgttgtttttcaatgaactttattctctaatttttagtaaagcacactaggaaataatgcttcagaattctgttttcgagtagtttcctgactaaaataaaaattcactaaaaaaaacctctgctgtcaccatttccttttttcttaagataactaggaaatgaatcattaagagtttgctccgtggcaatggatcgggaagctgaccctgctctctgtggggctggagccttgctaatgtcccaggatttcacttcacagagacaagcatcagaggcttgcttcatttatagatcctacttcttttctacaccacagccaactcaaaatggtgacagaatctaagacgaggctagaagtcaccacggagcagttggaagctctgcttccggttctgggggcagtgttcctggcgttgtgtcctttggccccacctcagtttgtccgtttagctcctcagctgagaatgagatgtgtatcatataggagtttcctgggccactcacagccccaagctggagagtgccagcctaatgtgtcaggagtagggggtgaggccagagggctgtgtgccaactcctccctaagaagcctcctgggaaagccctcccaggcacttcccaggtctcactggccgcctgaggctgcaggggaggatggtcaggccgcctcttggctggcactgcttcccggcgtgccgccagcctttctcatggggaggggaatgatggcatgcctggggggcagcagggccccagggctgcctagggctctcactgtgtcctcctggttctgagatgccacctttgtgatccactgtagagggatttattctattatgatcaatgcatagaaatttcttcgatttggagactgaacactagtgagcagaactgaaattgagctttaaaagatattgatgackggtctgtggataggagactttagtgtggtttttatgcagacgtcctgccagctgtaaattccctggaggtttggtatgtgagaacataagactaaacttatttctattttgttgaggagaaatgattaaaacttttcattgatgtacttctgtggcagacttttggagaattgaaccagcgggcatattcagtatttgaagtcatagatgagtaaaggaggtatgttgtagtttgcgctggcggcgtggcctgtggtcggcagggcttatctgtgaaggtatgtgcacagcttcctaaggcagtgaaaagtcctggcagtgttagtattgaatgagataatccaaaaaatgtaaaaatgtttacatttttaaagggatagttggcgatttaaatggtttctgctaacaaatcarattattcattgcagaggtaaaatattttcagaatgttaattttagatgtcgtagagagtgtacatcagcaatgacaaggtcarcaaaatatcttagcaaaacttgattgattgattccatgcacaggcaagcgctgttctgggcaccggagacggagcagtgcgcygttgcgtccatccacagatggcctccagagtcatgcggttgcagggaggccgaagggccagggaggccgctgggtgggcayggctgggcggtgccctcacgtgggttttgttgggctactcttactgtgcactttttctcagtttggtcagtgttccgccttgctgcctggcccccaaccctcgccctctgagggcctcacaaagagccaagcagaaggcaggctgggggcttttcaggccagcccagaggatgtaatgatgatggttggcactgtcccacggccgccaccagtctcacactgcctcgtgggcagtcctggagtcgtgcggcaccttgctggtccctgctctccttgaagaagggccagtggggcacttygccagagccttcttgtctgactccgtcatccaagaggcatggatggccgggcccccggcagtttccattctattctgagaaggcaaaacaaaattattcctgtctcttattatctaatatttgttacagcagttgctcacttttaggtgcattttattacagatttcagacaggtgtggttattagtgcagcttactgtttggacacaatgccaaggtcaggaggacagtgttcccctgagcaccacttctgctaggagcatgggcaggccatgcctcgccattaatctctcctgatttaggggaggaataccaggccaccccctcttctccctgtgcaagggaacagacatttgacaaaaacggatgccatgttacgctgattttgtgtgtctaaggcaractgcagcaggtgttatctccgtgctcttcctttcctggagtgttgagcatctcttgatagtaggggatgcccctgagggtggtgaatgtggctgcacaggtcctgaaagctatttgatgttgccgttacttcaggtagaacttaaagttgacagtacattctactctgcaggtggaaatgtggagtgccattttgacaaattggaatgccctgtttayaatatgctttaatgagttaaatctgggggatgtggatagaattttagtatcctagctttggcattcttccatgactttgggccaattatttaataattccaagcctgcatctttgttagaatctctaaatttctctactcctgttattatcctcagaacaggactgtgaggtgcagtaggccacatggtgtagtggtttaggtggacagacttgccagtgctgttctcatggatagcctaggactgtccctagctctctgcagtgacagtgatagtgactggtgaaggtgaagggatccacccagacgttcttcctgatggagagaggctggcctgtggctcttccctggggtggatgttaacctgctaacgtgacatatctagtcctgcttacattactaagtggtaggaaattttaggtaacacctcagactttaaagtggcctactgagctggtagaaaagtgtgtagttggtgctcagtaattgttgaaaagatagaagctttacttcaaagctcttgtagtttgatcagtttggaaaaaatattttaatgttgggctctgttaacagctggactggtggctgtctgaattgggaccatgcttggggtgaggtttttttcttacttttttttttttttttggtgagacrgagtcttgctctgtcgcccaggctggagtacagtggtgcaatctcggcccactgcagcctctgcctcctgggttcaagcgattctcctgcctcagttttctgagtagctgggactacaagcatgtgccaccacgcctggctaatttttttctatttttagcagagayggggtttcaccattttagtcaggatggtcttgatctcctgaacttgtgatccatccacctcagcctcccaaagtgctgggattacaggcgtgagccaccgcatctggccacatatttttttaaattaaatgtgatacataaaattaggctscaggcatggcctgatttgcaggtgcttcatgagcaagcgtgcacagcatttatttgctgctcctggagtctctcgtgtgtgcttgtagcctagccttaagccctctgtggacggcttggaatgcgtactccaaatgactcttttggcggggtgggaagtggcaatactttaggtgactgacagttgaaattaaccttacacaagagccaaactgtaggctgatgcagggccactcacctttgkactcacccctggcaggtcctgtaagaggtgctacttgcttccactttgccagctgttcgttggccctgttttgtcttctgctgtttgccttatttatgaaacagaatggaaacaggcgagtttgatttsttataattcctaggagtcatagaatggaagcaggtgagtttgatttgttataattcctaggattggataatttgccttcccctctctccatctttaattaatcccttaaaggaaaagaggacgacagcacttttcctgcagtcatctgtgtaggcctcagccttaactcatgacataggctggtgccactggccacagggctgacctcagctcttggagcccatggggtgacaggagatcagcacctttgaggtggcggcgtgaggcgtcttccaggccttgctcatggtgcttgaaaacactgctttagagctttgttaagagagagaggccctacttactcctgtcccacaggcatttgggtgttgacctccttgttggcctcttaaggagagaatacttgagtattgaattcgatcagcttttctgcctccagggaccctgtttctctctgctgagactgtggcggatgaaaccaggatttagtggatggtcaccaggtagcttgggcagacctgggccgcggggcccctgaggactcatacgyctttttcctgttcacatgttccttccccacaccttggcccattctcagtccctcccatgctccttagcgtgaggcactcagggaggtgcccatggggccttggggcctgtgctggagctggttcccagcctcagaagtgtgcctaactgtgccacattcattggaaagctgctttcacacttcctggatggaattckctcattttttcaatataaagtcactgagatgatttttttggagaagtctttaaaggccagttatacatttattgatacttggtattgacaaagttcagttgtttagtgttgctaagtcatactgtgtaagtttgttgagcacagagttttcattttatactttcagaggagaaatgaaactgaatttcgtggccagaaatatgtttgagcgtcatcctgatgtaagaacagaacagaaartgtgrtgacatttcattgtaactctagtatgttttcttttttgtccattagactacatgaggaaataattgacttttataacttcatgtccccttgtcctgaagaagcagctatgagaagagaggtggtgaaacggatcgaaactgtggtgaaagacctttggccgacggctgatgtgagtatgttctttggagttctgtgtcgcacgtcacgtgcragtaaatttaaataccctgtgatgatgatgtgtcggctagatccacacagaccttttctcgttggcccgaggcagcagttctccaagtgtgctttgagaaggcctccgttgcctggaatgcatggcccccggcgcacctgcacctgctgtcttagacacctgcggtggccgcacatcttcgtgatgctggcgcgcactcaagtgcgaagaccatcggctgagggatttgttgggtttttttttttttttttttggaagggggagaatggtgtgattgtttctcttaagttcaccttaaaatttagaaatttcaccctgtcacccacccctgcttccccaccaccacacatagtagcatataatgtgctcatttttgtaaaacttggaagtgttccctcatcacacaccactcttgcagtgaaggaacaagtgttttttgacatgtggagtggggccttctggaatgcttggtgcaggtggcgtgaagcctgcccctggccggctctattcagcagccttccctactgctgactgggctcagtggaccagcagggctggccgtgccccagctgtgaggggcatgtgtgctcttggtgggcaagggcaacccagttttctgcgcctcttttaaaatgatacagatttttggctttaaacttcagagtcctaggacaaagccctgccccagtgccttagctgtgggtttaagaagaggttgaagggtttgaagctagctctgaaaagtcctcagctttgaagggttatagggtgaggacaaaacttgtttcacctcttaattttgagtttttaaacattccttttttgggcatgtctttaacttaaagggaattttctggttgattgttatacggtcccctccatcagtttccaaggtagttttattttttacccaagggtatagtgagggctttcttttagtaagaaataatggtagtgtgactgcttggtttgtggtatacattttaaggcaaccactctttctttcaggtacagatatttggcagctttagtacaggtctttatcttccaactaggtgagtaccagactgcatggcatgggctagtggggggctgggatggtgtctatgcaatattaagggctacaaatagattctttgtaattgagtctaaggcgagaaatgccagctaaaggaaaagactgtggttacagagggaaattggcagaaagatttaatttagtgttatgatgaattcattgctttgcattttkcctctcacacttaatttgttggggtgcaaaaatgcttcatgctggaaatatgaagaagacaggtgggaggactgtgggaagtaaacgcaatagaagacattctgctgatattttaggacatgtgtttgaaaaattgatcttatgttttgatgaagattcaagcaaaattctctttaaatagtattttctaagtatttttacctgataggaaaatgtcaaacaagtttgcattctaaaatacaaactagtattttctcattaaggattcttgatagccaaataaatttcctgtgcactgtctcattaaaagcttaccttctattaacccactgctagttagcatttggaggccgaagaggctataatctcaggatttgggggttgacattagcagggccagtgggtaattgaacaggtttgggtatccaggaatctctgggtccgcaggagtgatccagcgtaggcagtgccggagtaggtgctgggagagcggggcctcagcctggtttgggggcaggcattttcatytgaatcccctcacatacctagtgctgttgggagaatgatttaaccttcttgctttccatcttatgctacaaatatggaagtcttcccttaagttcagcgaggacttgctgtagttcatgaactgcacttcacctccttaggggccataggctagtgggattgtgtcttggcctttgtgggagacacaggcacatgtgccttggtgcttatcctccccacacgartgtgtaggctgtggcgaggggagcagtggctgacgtgcgttttcttctgtcagcgacatagacctggtggtcttcgggaaatgggagcgtcctcctttacagctgctggagcaagccctgcggaagcacaacgtggctgagccgtgttccatcaaagtccttgacaaggctacggtgagtgcctggctttggcccctctgaccgggcaggagccttgtcacatcccaggtggtcacaggatacgcctgcgtcacgagcttgtggtattttacacagttattggctacagttttgaagattaatctgcttctggtatagacatgtgttttatgtttttgtttcatagtcgtgatcaccaactgagaacatgtttagtgacagtctgaacttttgggacttgtgagcccattaaactgttcttggaatgaaaatatatgattgtgtctacttgtgttaggatgaataggaaaggagagtcatctgaaaccggacactgacattcaggtgctgcccattatggagagwgtggctcaatgattaaaccatggtttttatgattaccatttgctatgttatgttaaagaggaacaacttagctgttcctttcgtggttccaaaaaatatacatatatgaaaagcctyttatctttgggggaagtttgaagatgagactgttkctggtgtgtacttgctaaggtttatgtcagttcaagattataagccccccagggactatgaggtacttgcctgttgtatgacagttcttagctcacctgtgcgaccggctagcatttcatttttaaatttgtgtgtcaacttgtgtgtgattcacatccttatagtgtttagcagaatgtaagttaaggcaggagcttcctcctgcctgtgtggtgataggggagggggcattcacatgtttctcattgtcaggtgcttttgattgaggctgggggcaagttttaaaacatgatatatgcactgaaaagtgcacatgtaccaggtgcacctcttggtgagagttaacgaagtgcacatgctcatgtcactgtcatgtggaccagagygagcaggcagcaccagaggttccctccaggcccaggttccagaaggggctgttggctcttctcattagcacgagacaagccctggccggccactttctcaaatgcttacgggccttattgcacttagctctcccagccactctcatcagcagatgctgttgctgttcacattttacaggtgaggaaactgagatgcggagaggtgaggtcattagcccaaggtgggtcagcggcatagtccaggccgctgttgtctgctgctcctctgtgtgtgccaaggggcagcggggaggtgggtgggaatcctgaccaggcgaccacctttggagtagaggaactaaggcgcggctgtcctgaggccacacagtaggttgagcagttacagtaactgcttagtcccagtgacctcgttactgtcgcatattggctactaagtatcttttcctctgttacctgagggccagtgtagactgtagggagagcctggagcctgccactgctcatttctggggagcactgtgcagccggccagtcatgggcacaagagacccagggcgagggctgagtttaaggtgaaatcttgtctatttggaacaacaacccaaaactgtgttacagtgttaactcctcacctccaggatttggggttcctgccgtgagtgagtgtgtgcaagagtagggcaggagagtgccaggagtgattgtgggaaggagtctatgagatggaaaggaagctgcttcctaaactgtgggtgtcagggaggcatagccattgagtgttggcttcttccaaagcagtttctgatgagttctttgggaaagtatttctttctctgccttcttaagaacatactggcctcagggcttaccctgcctggtggtcgcagtggtgtccaggtgactctggccccactggcatgtcctcacacgctgagtcyttggttggttgccctcaagtgtagacattaaagcccagaataggtgtgtactgaatgcactgtccctacgttgcctatcactggcatttgaacttttcgttagacactgattgttttggttaaaggaattcctttttttaatccttcaaggctgaaggaaacaaaacattgccttttcttctggaagaattcagttttactggtggggtggagggtggggcatgagtgtggtctggacagttgctcaggcagattttgaatgccattcggtgacagttcttgttggtgagaatatttctaaaatagccttttatttgctgaattttttaggggaaaaatttttttagtaaagttgtcttaaagagtgaaaacccraagtagagaaacaatatcagtataacatacaatttaaaaaatggcttcgaagttacattaaatgatttcaaaaattctgccaaataaaagtctggggccaagcacctctctccatcccagcacatagggtgggcgtggcagagactaactcctgttccctgttggctccctcccctcaygtctctttgatgcttggtcacctctggtgctgatccagggctacaggggctgggcagaatgtgggtcctgctgtgaggggctggggcctgggagtcgtcctgggttcagggactactgatgctgacagtgttctctgaccccctttcattactaagaaaaaacaccaaacctctgtacagctttggcagcattttgatgcctggctgtggagagtcctgcatgttaaagcagtttttaaaatgaaatctttacaggtaccaataataaagctcacagatcaggagactgaagtgaaagttgacatcagctttaacatggagacgggcgtccgggcagcggagttcatcaagaattacatgaaggtactgtgcttggtgacccagcgcggcgagagtgcaggactggagtgcttgtgcttggtggcatcctacgatgtttacagctgtcagctgcacacacaagtctttcgtaacacagactacacttacattatttctcctacaatattatttctagagatactttgaaattacatagytgtttttaaaatttgcttttcctgagtaaccattttataaagttgacaattattttagagagctttgttaaaatgttctttctagttattacagactttgcttctagctcagtgtgcctcattcgcaggttttacccaggtggaagttgataaatcatgaggtgccttaaatatactcactttgggaggtctcagtgcctgaggatgggcagagagacttggttgagctgacatgtttgggactctgaccatgtgcctggtcttaaacgggtggtcatgacctcctgttacagtagaggccgtgcagtccttagcaggggcagacgcacctccgggtggtcgtgacctcctgttgcagtagaggctgttgcaatccttagcaggggcaaatccacccctgcaatctggtcccatcttgttccattttcaagggccttgctcttcaggttcccccttcccccttgtcatctggtctgagggagcatgtccaccccmagcgcaacacgaacagcagcagccaggctttccctccctccygccatctcctgccgctctgccttccttgccagcctcactctgctctcctgctccggaggcccccactgtcctcatggcctgtgtagcaagcacataaacactccagtgaacgcgctggtctcttcctgagttcctttgtgcctgtggactcgtcatggtaggggtgcacccctgctgagtcgtaacccagggagagctccacagtctcgattttcacaagcccctcaggaaattaattcttagcgtcccccaaccaaagtttgagacttaatgactgagagccttcagatgggcaagaggatcgaggaaactttcctttctgtcttgtgtgatttgctatgtgaaatctctttgaaagtatggtaattactcagtaaatctttttcttttggaatttacagaaatattcattgctgccttacttgattttagtattgaaacagttccttctgcagagggacctgaatgaagtttttacaggtggaattagctcatacagcctaattttaatggccattagctttctacaggtatgtatgctttcttgagactgtttctgttgagacatgtgtaagagtagactcttccaaccagttgcctagtgggttccagcagcctttgctctccttttactgtattgtttcaatttggtagaggctgatttctgattcttacaatcaaaccctcttgattaatgcacctttctggatgctcattttgtactgggtgtaactgttggtgcaggggtgcccrtctggttctgtgagtccagtgcacatcagtccaagctcagrgaattctctgtattcagaaatgtccatttcatggtaaacaataaacatttcttggtgcttgtctgtgatttatattgaaaaaaatttgtctcagaataaagttgagtaccacatatgagaaaaggatttacaagagagctttctcagactgatgaaacatcattattttgtcttaaattatatgtggtccttattttgctgagtaacatggaaaatctatcaatagaaaacctacgtgttttaaaaagtattgttaaatgctgtgatgtattgataaactgtaattatactttttaaacatataaaatcatctctaattggaacagtaattattccgtttatattttcttgagtgaagaattctgtcctttacaaaatcttgcctatataatttagccgcacggctgtatttctccagtgtttaccattaatttggtctttgtgattgtgctgagattaccgaatctgtccatgatttggtaatgttctcactgtcatgaatgctatgatagtagaatcactgggtaactacctgtgatgatcgcagcttccttggtctgtctctgccaagatgctttaaragtagtgaaaatggaattccatgtctgttttcttacagttctagtcacactgtcctgtcttcactttcccctctgagatgtggcccttatatatagcctttcttccatagtttttggacattattttgaattaaacatgggcctctgttctttactgatatactcctgacttgcactattttcatggccttgtagtaacaacagctacttaatactttgatcatgcatgtgccatgtgccaggcctgggtccagggcctcctccaccccctcagggggtcctttcagtgatcctgtgaccccacaggaggccaccacagcatgagtgggattcctgtgttcactgccacatccctgtgccttgtccagtgcccagagcttgtcctgcctcagcggtgtgactgtggcagcatctgagtttcttgactaagtgaggggaggaggcccaccctggcaccggccaggctcttggatatgtgattttggctaaaagacaaggaataaggaagggaataaaggtcaggccagaatcggaatcctcctcttgtgtggtggaaatatgcagagaactccggaattcttctgaaccctaaaaacatttgtatgctttctagctgcagctcctcctggcactctgtgttataaatagtttcaagcaccgtgcttctctgagggctttctctcatgtgccctcgtccatccctttcgagttggcactgtccgatagaattctgtgatggtgatggccacttctgcatggtccggcaaggggcwgggcgccacatgtggctactgagtattgcagtgtggctggtgagagcaacaagctggatttttaattaatttgttttaattcatttaaatagacatgtgggcaatgcaggtctggacagctgagaattatgaccctcaggaggtgtggtggacagtggtttacttccgaacaagcccagtgcctgcttttgaagacgatatggcactgaactgagagtggtgctcatctgtgtgacaagcaggatggaagcttgctataaatattgtgatataatgctaatgacctttacacagctaaaatcartcctttcacttttccggttttatgtgatactgccatactagtcagtctaacactgacccctgttggttgtgcttcagcataacgaaattaggatgacgagaatctgaaattacatctaccatccaggtgaytaagttatgcagaatatagtccaacttatttgcccatatttggttaatcagatatctgtgtttgcaggaagtttgctgtatggattaccaatttcaaaaatcaaactacactaaaattcagatgagtccgttgtgttccttttgaacactcctcgttgaagaggctgctgttcaggcttcctcgtggtgctggtgagtgagcgagtgccactcactggtattgccttgaagaggctgctggacagcagacttcgtcgcgtgctattttctttagaacatgccatgaatccatacaaattgtgggtgcattgcttttacagttgcatccaagaattgatgcccggagagctgatgaaaaccttggaatgcttcttgtagaattttttgaactctatgggagaaattttaattacttgaaaaccggtattagaatcaaagaaggaggtgcctatatcgccaaagaggagatcatgaaagccatgaccagcgggtacagaccgtcgatgctgtgcattgaggaccccctgctgccaggtaagggcgccctgatctccactgctgagagctgggccagcctcggggacgtgctggtgacagggcctgtgttggggctctgagagccccgggcagttcatttgctcytgatgcaggtttctcttatactaaccagttaataatcacactttgagaaatccttatttaatgcttctaattaacttttgtctttctaactgtttacattctataataaagaagaattaaggaaaatcttttctttttctgattattgaagtataacatatccaccctaaaccatttgtttctctgaagtatgtaatatagaaaaaccatggatgccataatccccttttatttggacatgtatttctccactttttccctatatggatattaatgtttattattgttatcttgttgaacacatcccacaacgcaaacacgtttgtcacttggcttttgacttaacgcttacccttgaccctttcctatgtgtgtaggttgtgttttgtcgtgaggattgccgcattgaagagtctaaggctgggctagaggtttcccggttttattcccattggygtattcaggggtatttatgtcctcattcctttggtgacagtcttttaaaatctttgccaatctgataaaaccatgtgttaacgcttttaaatttatatttctttaatgattagtggggttaaacacattgctayttatgaattccacaaattttgattgagcgtctgttaggtgagataccattcttactgttggtgataaaatcgttggcggacgggtgacagaacaggtggtggagagcccagctccaggcgcgtgtccctgggccttctcctctgtgtggctctgtgtgctgtccgcccggttgctggctgccctcctctgctgtgtgcaaggcctgtgtgtgtcrgggaagcctttcttgtcacacatgtcatactttttccaatttgttttttgcatttgtatttttttattcagctcctatacatttaaaaaaacacctcagatttaatggttgtttttgttttatggcttctgggatgtgagctttatttatttcctaaagatcgtctcaaggaaaacacattggctgatgtgttttgttgttgtttatagatggcatgatttgtgcaggctcttgagtggttttcttggtagcacggtatggcagtgtatcatccatttttgtccgttggatgagtcacattggagacattggcattgtcttcaagtgtctgctgaaatgtactcaaaaaacaaagacccacataatcgttgagttataatataaatctagaaaagataaaactccagtacttagaacatatatcctttaaaagaaatccacacttaacctgattgtgaagaatgagttgtttgtagattaaaattmgaaacagtgcwtttcttatgaaaattaagcttctcctgactggcttccttggtgactgctgtgacagattcctttgatttgctgtcccagttttccacacgtgagaattcacattccattctaaaggatttacttcctgtaggttccattagcgttgactgagttgtgatgcacttggggtgagctgcccttctacctgccctgttggggcactgtgaggcctcctgattgtcagatcagcgatcacagtgggtcggtgctgctggtctgcacaatggtagtctttggcttcctcatgtttctgccacctggagaggtggctttttgtgggctgtcactccgtctgtgaatggcagccgcctccgtgaggtgggccatgagcacaggggcactgatgatgcagaccagtcctctcggcactcacagactgtgccctgtgcatggtgattgacagggcctttgccagtgccaagtgccacccgtgcccattgtgttcgcctgtctgggctttgctggtagggtctggaagagtttcagtggtgagggcctgcttcagagtcacttgtatgagaagatccraaacatgtggacgatggtgtgcatgtggggagggtctgacatagcctttttgctgcagggaatgacgttggccggagctcctatggcgccatgcaggtgaagcaggtcttcgattatgcctacatagtgctcagccatgcygtgtcaccgctggccaggtcctatccaaacagagacgccgaaaggtaatgggttgtgtgtctgcgtctgggctcagcgtgcctgtgggatggtacttatccctttcctgtgtcatttacctccatgaaatttatgaagggatgttctgccrtatttcagtagaatctagatatgttggtgaaggaaggccttctaggaatatgggatggctgtgtgggattcatccatggttgagagttgaaaatttctttcttggagatttgacattttcttcagggtcttttgttttggggaggtgatttctggcttttaaaattcagtccctaccatcttctcttatgtacactcgtcccttgttctacattttggggcatttttacagtcccaaaatgtagtcagaagtatttacttctcacccagatcatkctgtggtagtggaaagggtggtatttgaaggggtgggagatgagataggaatgggaaggaagagtaacgtggtcgtcaagagtggaattcgaaacagtttgatagatctgttctgtggtggatgatggaataaacaggtttcgaggcctggctcagcagccgctgcaggtgctggtggtgctggagctctgtgtgttcctgagccgctgtctgctcggtgttttcaggcggagctctgggccccatgtagggcactcgtctcggtaccgtctccattctcgtccgtgcagtgggaagtgaaatgtcagcactgtatgatcatcgtgggtgggaaggccccgctcccctacttggagctgcatttcacagtggtcttctgtaggtagatgtactgcgatcccagggtatgcttgagctgaatcattaaaagtcagagatatttgtcaacgtattttagctcctttcctactgtccttcacctagcgagatgatctgttaggggtataaggtagctgttcgagaggggttctcagctccctgacacctgttgtactctgttgatctccaacaatgtccctttgcagtactttaggaagaatcatcaaagtaactcaggaggtgattgactaccggaggtggatcaaagagaagtggggcagcaaagcccacccgtcgccaggcatgggtgagagattaattcatttgtgttcatcctaaccactggctggcatgttcatgcagaagtgtctctattcstttgtggtaaattggtcaaattaagaaaatagctagtttttctgatgagcattaattaagaagacaataagatctagagcagcactgtccagtagaagcaatataatgcatgccacacatagaatttcaaagtttctaggctgtgtcaaatgtgaaaagaaacaggtgaaataattttgatagattttattccactcaagtcaaaatattaacatttcaacatgtaatcaacataaaaataattaagatattttatagctgtttcttgtactgtctgaaatccggtgtgtatttattcgtacttatagtacatcctaattaggatgctaaattttcgtaaaaaatacttgatctatatttagattttagaaagttcacagttgaagatgatttgcatacccaagttattacaaacatgtttaatgttttccaacaactaattgaatgtaatttttaaaattaaattaggcaaaacctaatgttgggtttgttagtcacattagcagcgttcccggctcagcagagcccgtractgatgctgccrgggcggctccacgccgcagttctcaggagttattaaccaaggctttttccctccacagacagcaggatcaagatcaaagagcgaatagccacatgcaatggggagcagacgcagaaccgagagcccgagtctccctatggccagcgcttgactttgtcgctgtccagcccccagctcctgtcttcaggctcctcggcctcttctgtgtcttcactttctgggagtgacgttgtaagtgccctcccctcctccgtgtgtctgttggacagtttgtgtctctggtaaatgtccatagccgcgagcttaaaatctcccccttggttttgctcaggttttgtttccttgtatgtgtgtggaggtgggtggggggcagccccgtgatgtgggcaccaggcttcctttcccctgccgtgaaccttcagaacctgtctgtgcgactcatgcggctgtcgagggcagtaatcctctaaatggttgaactacagtggacttccttgagtagtttttaaaaatttatttgaagattaaaaaaaaaattaaatccaagtatctcttctgtatttcctttaacattctttttcagttgtgatgaaattacttgaaggaagcctgggtaggtttgggctgcctgttcagaagttagacttaatttgaataacctttcatagccagcctggatgcaggcgtttcttttcatagctttaaggaagtagtagtgcacctttgtggtacagctgtcctttttgttttttgtaccgggttcaaggattcagacacaccgccctgcacaacgcccagtgtttaccagttcagtctgcaagcgccagctcctctcatggccggcttacccaccgccttgccaatgcccagtggcaaacctcagcccaccacttccagaacactgatcatgacaaccaacaatcaggtacgtggccctctggcacccttcccgctggtggcccctgggaacagcatccgagctgtgatatgcactagaggagattgatggtcctttgaattagaagagtaactttttgagtmtttggccattggtgtgttgttctaggaaatcctctcttttttgtggtgttgaggtcccccatgtatagtttcagcagcgaggacactgtggttcttgagtgctgccgtggcttttcacgggggccaggttgactgccttcctgcaagtttcctcactgccccagcatgagactgctgtcgagggtcatcttgagagagcgactcagtcacgacccacttagctgggcgccaagccgtgccagacacttgtccctacttcctctcagaatctcaatgaaagttttaatgtgaacttattagacttttttcatgtttgaaattaggcataatttctaaggctttttctgttggaatatactgtttttaaaatttagataaaattagaaatctaaaggataattttataaatactaaattttgtatctacttgcgattatacatcacttgaatatgtgtgggtataaaacccaacatgttaattgacttaaaaccattttctgaaatgtggggtataatttgagcataaagctatgtaggtacatgcaaaagtgttttgactcatttcttggagttttgcactctgctctggggaagacattctcacaggatccaccgtgattctggcggagcttctgggatgctggctctgtaatgacccacagagctgatgagcagagccatgrcccagccggacaccgtaacgtgtctaattgcagcataagtgtaaaattcaggggcaattatttacactcttaaaatgaattataccacagataaacttggtcgcctttttatggtcatcacagtggccctgacgtcctggccatgtgtcacaaaggtgtttgttttaaccacccacaagccttggggcccttgagagcccagtgcggctgctgagctacagagccacactctgcggctgcttgtgtggttcgagtgtgaagtccagggacgctgarggtttataggtttttatctaagaagactcttggccacagtcaatctccagaggttgttggggtaaatgcacgggatgccaagatgcaaccaggtcagtattgcaagtctgagaaaaggggttctcgttagcrcacttctgctgctgacagtaacgggtgatgctgacatagaagcagcctgggacctggacagcaggcaaggaaggaactgccagccgtcccacggcctctcaggccaccagttgggccagccttgggctgtgacccctgagttcagcgtgtgagtagggggttcaccacgggggtgacggttgttcttctgatgactctaatgtcttgatcgtttgatcttcaatgagtttcaaactttatgacttggattactgggcatactttatatgccagttgctgttttagaatacgaagtatttccaattcaaagcacaatattgttaggtaatagtaaaacagactgctctatggagcccacatgcaactgtgccatttatcagctgccctttggtggtgctgagcttagaagccggatggttttcctctgattgctttggtacccatggccgtctctcattttgttcctagaccaggtttactatacctccaccgaccctaggggttgctcctgttccttgcagacaagctggtgtagaaggaactgcgtctttgaaagccgtccaccacatgtctyccccggccattccctcagcgtcccccaacccgctctcgagccctcatctgtatcataaggtatagctctgtcctggtgcattcacctacctgttcaagctgccatgtgagaggcggtgctaaatgttttctcctccagagagaattccagagagatcatttgaaaacggaatttgctttgttgtcattcagcctgtttgcttgtctttccaaacaaaacttaaaaaagttaaattattttaagatgtaatatatagtttaattggttgccacaaacatctcttaattcctctgttgaactgattagcataaaactgaagtttgaaataaggctcaaaatgaagacttttcccatttacataattcatttatatgctaaataccttggttttcaagaagcaaatgataaaaccaagagcagatcttgccatgatgtcccgtgtatgctgctgtcattcccacgttgcctgatccccgcctggggcaggagcaagcgtcagggctggcagagctgtgtgctgggcctcagcagggccctggcatgcgtgcccttgtggctcctctcaagtccagctgtgtgcatggaggaaacaggtcacgttaagtctctatattcttgaagtacctgaatgattggragagccatggcgaggatcttccaggtcagcccccgtcgtgtgtgatgttccttgggctctgcggatgctcggtgcttycatcggtgtccacacctctttattccgctcctcctttgcttgtctaatcctattttgccagtaagttttttattcttgaggctttgttggccctgtgttgtatgatgattgtttttaggagttaagtaatagaacatttcctcttggatttatccatccccgatagacacattcagggtgaaagaacaacttcgcacaccggcctcttctttgcattttggctttgctttcccagtctcctcctgctgtttttcttgctctgagactttcctgaagccgrcgtgtgttccctctcagtctgcttggccgcgactttgcagtgcagggaatgtgctttgggtgtagcccaagcacaggctgctgcatgctgggatcgacaggctgctgagggcgagagcgccaggtcctggcacgtgtgacttgcttggttctttctagaaggtcacagctgggggaagaacatgacagggaccttcttacttctgtttttttggagacagaatctcactccatcacccaggctggagtgcagtggtgtgatctcagctcactgcaacctccgcctcccgggttcaagcaattcttgtgcctcagcytcttgagtagctggaattacaggtgtgtgccaccacacccagccaatttttgtatttttagtagagacggggtttcaccatgttggtcaggctggtctcaagctcctgacctcaagtgacatgcctgcctcggcctcccaaagtggtggaattacaggtgcaagccattggcacctggctagggaccttcttatttctatggataagtggaacaagttagaagtgaggttctgctgaatttgtgtggtttgatcctggtacatggttcttgcctttagtcattcacggaatgggaagaatgcttttctctcagatggaggagttgggaagtcccagagggcaggtgtccatccctgctcyctatgtaacatcacgtcggtgcttagtgtggtcactgcccgaggacgtgggcattgtgcctgctgtctggctccaacactgctgtctctctctttctccagcagcacaacggcatgaaactgtccatgaagggctctcacggccacacccaaggcggcggctacagctctgtgggtagcggaggtgtgcggccccctgtgggcaacaggggacaccaccagtataaccgcaccggctggaggaggaaaaaacacacacacacacgggacagtctgcccgtgagcctcagcagataatggctcctggctgcgtcagcctsccccacccctctgcagactgccccgcggcctcggccaccggcaggggaaccgagaccagcaccccgcacgtcagccgggctcgcggcacgcccgccgctgatcactctgcatgtttcttcgtgtggtggtcgcgtccatcttcaagaacagctcgttgtgctcatctgtgaagccttattaaacgtggacgttgttttctgccttcccaggattcttccttcagtgctgaggcaggtygggctcaggaactgcagggacgtgaacatgcgcttgcggtttgaggtagccgtgtctgttccttcgcggtttgctattttcatttcctgttcgtcaaagcagcagaggagatcaaaccccgttcgtgtgtctttcctccayggataagcttgggaggtcattgttttactgccctcacattttgtttgaaatttcagaactgtttttctatgtaaatattgaaaacttatgatttgtgcaataactcagatattttttatttaatttcctattttcacataagttatatttaagggaggagggaattttttttaaacaagcttaggtcctttcccgagctgcattttctaagttgggtcatcgtgtcggctggttgtctgacgagcatcgttacaaacaccatgatgaggggtttggggttttattttgatgtcttttcttttggtcggaagtgagtgaaggagccaggtcgccctgaaggttttccaaagggcttggctccagagccacctggcagactgcccgtggccctgctgtcgggccccaggccgttgtcctgctctgaccacagagttttaatgttttggttttcacttcttttaaactggacaacaaatccagcatttcaagtgccagaagtataactttctaaggagagaagggttgtcacattataaaatctttaggaaaatgtgaactggaaaacgcttcggtcagttttagtgacatagcctgtgatgatgggtctggtgactattattgcggaccgtggtacccagttttaggaatgtggagaaaggaattctgttgattccgttgaggaatctgtagcgtatgcattcgttctgttaagagcaaatctaggagaagtgcttcagctgcccagtgcgccgtggggagtgttttaacggatcgtgtcgcaggagagcacagcccagcgttggggccgggaccgctggcgcccgacgtcggaagcatacaggtatactatgcaagtgtattctgccacaacaaccactgtctttgttacctttttttgaacaagaatatatccatcctgcctaaccctgagtttttggagcaccacagttgtcctgggagttggttgcatcttgtaggccatctgacttcctgtttttaaaacgggggtctggtcttgctaaacactacaggtaggttggtctttgaagtccactagtggagaatgtcaagacaagatacttattaccatgacatctgatgcatgtgcagcagtggggagttctagattgatctctgaatgtgatcgacgcccagcaaggacaagctttaaaatgtctgcggtctgcccttttgaagcaggactggctcactctgtcattgggagctgtcagctgcgactgcaggttctctaggaggcattccagaatagagtagcacactgtgtctgcagttctcgatgaccgaaagttatcaaaaatatttaaaatatttaaattgtgaacctattgataaagaatatttataaaaactgatctgtaggcctgtactaatctctacgcattagcaatattgactgtaaacccacattaaggaaaccactacgggtctggcagtgcgtgtcccgtggggtgtgcattttaaaactcgattcatagacacaggtaccatgttccatttccgtcatggtgaagcaaatgaattggcctggctaccactgtggtcgcgtgctacaggtttgacaaaaagatatcatgtttcgatttttttgtgtgtggacaacaatatggaagctaaaattgacatatttttatgtaaagtttttctattctttgatttttaataaactttggaaaccagttttgtgtttgtgtccaagtgtatgctttcaagggcaagagtggcttctacattttccgtattgaatttctaaattagggcagtgctttagccatttattctaaataagattcaagagaaggcagatgattccagtcctataaagcaagttgcagcagggagattatgttgtcactggtccattgaagtaggaggaggtaaaaatacaaaaattagccgggtgtggtggctcacacctataatcctagctattcgggagggtgaggcgtgagaattgctcaaacccgggaggcagaggttgcagtgagctgagaccgtgctactgcactccagcctgagcaacagagcaagaccctgtctcaaaaacaaacaaaaaaaagtgggtggaggttctagactttgcataaggcctatgtaacagtaacagaaacctgtcctctgtcctcacattctgatgctaacaggaattcagtaaaactgtttaaatgattcttatatgaagtttctggcaagctgctatgtgatactatgtacttagaccgcccaggggcaacattttagtttcttcatttcttttaggtcagcattgcgtcacttgcaaacaagacattacaaaccaaacaatcataatgtggcttaaaatttaactgacgtttgggatttatttatttatttattttgagacagagtcttgctctgttgcccaggctggagtatagtggcacaatcttgtctcactgcaggctctgcctcccaggttcaagcgattctcctgcctcagcctgccgagtagctgggattagaggtacccaccccatgcccggctgatttttgtatttttagtagaggtggggtgtcaccatgtcggccaggctggtctcgaactcctgacttcaggtgatctgcccacctttgcctcccaaagtgctggaattacaggcgtgagccaccgtgccctgccgacgtttggaatttatgaggaaaggtacaagaattcttctaggccagtaagtgacagaactgcatgtcccagcctgtgcagccccttgagtgcatgttctagagccatcagctctagagtccttccggttgtcaaggtgggtgttgtgggtaaaacacacattccttccacctggagaacagagcagccctatcctcatggcacctggttcctaagagtgtgcagaagccgctgacagcaccatatggtggtgctggggggaagacgacaggcagctgagtgggactccaaagcctctccagggggcagagccctgtgcagcttctgcatgagctgcggtgggcagggtggggctggcaggagttgagcagggcctccgagggaactggagggcttacagctaggggcatctggaggaggaacccaggacagtgctgaggtgcagggcactggaggcaggagacgtggctgagttagcctctgtgttggaggcaggactgatgggtatccggggggaggcactcttgacctgccctggatttccctgtgagttgtgatgcttcctactcagctactgatacctgcaggagagctgcctttaggaggcttccaggagcagcctctggagcagctgtgttaccagggagcctgaggccccacagaggcacctgaggtgtcaaatgggtcccgctctcctcggaagctgggagtactggaaggtaagggctttctgagggcacagtgaacctgtccaggccactacgtgaacatcagcaagcccaccatgtagtctcgggaccccatgcgctggatctcgtggtaacaggtaaccccctcgtgaccagcttccgtgtgttccttttgatttgcccagggtctcgagtgccacctctctaccctgtgagatacgcagaggaccctgtaaatgccgtgccccgcatgcctcggcctgggcgtgagccgtacgcgggggaggtggtgacgtttgtaatccagacgtcgtttcgttgcgactgggtcacctgtgatgccctaagccctgagaacttttcaggtgtgtgtcattatcctcctgctgttgataacttttgaggttcttgccaatccttaggtgactttgactacctttggtcaaaggtaactgcctagaatggacagtggctcccgttcaacagacacacatcccagacaccacgctgggggctacgcctgttgtttaagaatggccggaaaatatgttgcctgcattgtgtctccaggacccgtgtgggagggttaacttgggaggggcrgggtcccactagccctagattgcaagggtaaactgcctggtgtccttcatggtgagtcttactccatgacttgatcctagagaaggaccagctaaggacttcagaggtcttggagtgagttccaggcaagggcaagaaaccaaggcttttcatggggttcttaggtaaaggacgggggtatggaccagtcacactgggaggttgagtcctgtctcctgggaagccacgtggctgtggggtgagcttgcccagggttccttcccgccagtgtggatatggcgccctctgcccaggcctctgagacggaacgcttggagctcggccaatgcttaggtcatcataggtgccgtggggtcagtcacacttggttgagaggtatgtgactcgaggcagattcctgtcattcctgcttgtatttcatcaagtcctgagtgaggtttgtgggaatgggtgcaggtggctatggccaaatccaggtctcaacagacagcaaacctccacacatcctgccatgtcactgttggaattttcaagctgggtggaatcttaaggaccagctagagcagctcagccccgaaaatgagaaagtgaagtcctgtgacgtgacggrcttctaaaggtcacgtggcacatccgccaggcccccgagagggcgctgggtctcgctcccacaccactgctctttgtaaagtcctgtggcccctttttgttgtctgacaacatctagagaaattgctgtgagtttaggtggaacactggtgcttacattatgattgagccccaccaggttctgaagatgtgtcttgtgcctgtggctcacgtcrtggggagcctttcagggacacagtggcatcaccagccaggccctgtgtgttgaaatggttatggtggaactacgtgggctcatgaaacgtgagaggcttcctgttggactttttgtggccagtgtttataggatcctgccagcagagagcctgggcctagggcccaaaggctggagttaggagctggggtgcgcagagccctggaagggtttggcaggccaggggagaagggagtaacagtctcgctctgtgcttcaggcttttycttgctggttcaagtgtccgctaaaagcagctaacgtaatcagtacagctcctctattttgggaaatcaaaccccaaatctttaatttgatttacaaagctttccaggatattgcctttgcctccctttccaatcgtgccactcgggagttatttctgttagaaaatagatatttccctctcagtgtccccaaatgtgaaagaaaagtcattgtcatcagtagtcttgggtagaagagagggcagccgtcactggaaggggaccagtgagcaggctgttcacagagcaaaagggagggtggatctccatggacagtcaccggcttcaagtcttgcttctgctgcttcctggctgtgtgtccttgggcacgtcacttgactcctgtgctccagtttcctcatcttcccaatgggccgttgtacagactaaacgagtaaatgaacatgaagcacctggagccatgccaggcccgatgtgagcacttgggccgcatggactcatgttattagacctggtaggcccggcgcagggaaccaagcctgtcaatttaaaggggagtggcgggaggaactcatttttaatgacaggcaaaaagggaaaatattgtaatacatggcttcctattttcctttcccctttttcttgcctttgaatttataatgttgcttatttggtatttaagattcttgctctggagctttgaacattttgaaagaaaaagtgtcgtttaataaatgctgtcatttgacattctggttactattttagggcagcatggtaggtagacactgctagttacttacccaatatctattttcctttttttcttccaggattgccagatttagaaaatgaaaacgcaaaactccaagttaaatttgaatttaagtagacaatgaatacttttttggtatgtgttccaaatattgcatgggcaatttaactgggtgtcctgtattttatctggctcaactttgtttagacagcagggtgcacagctgaaaagataacttttataacatctttgcagctaggggtggtcacaacagagtgctttcctttggaatgaaacttttctaggagcaagtactttgcttccctccttggattctggctggaattcaaatgcaatgcctggtgacacagcagccatgttgtaaccatgaagtggctagctgtgtagtaaggctgacagagcaggaagccagaaaggacccagagtcctgaggctttggtccttctttctatgttcatatataacatttgcatgaagaagacacccacatctgtttatgccactgatattcagggctctcagctgaatacagttttaactgatatatacaggaaacacatacttcaaacaaaatctcatgtgaaactccatatgggttgaagttctggttaaagcagtctggtagggaggaaaaaggggacatagcttcattgcttgaatgtctgttccactccttctcccttctcccggattttgggggatgccctgtggagcccctcactttccatggaacacatctttaagccaggaaaccaccaactcttccccactcttagttgcatttttctcaactctttaggacaggggttgaggagggtgtcctgcggattgcacaaatgcctgctggactgatcagagccctggatcctatacctggagttgggagcttcccccagggccctgcagctcccaccctggttgctgtgcaccgcggaatgggcccgtcaggaaacaggaaggcagcctgctccactcaggtcatttgtctgcctcctaatccagctaaggcacaggctggagacctcagttagggaagtcccttccctgcccccttgggaacactggccccacctgggtgctggtttcaccactttgttaccaaagtctgtcacagacaggcattgggtgaacttacagctcagcctgcagacgtagccccagggcagcatggctggactgagctgtgcacagacgcctgctgcgtgctgtgcctcccctgcgggtggaagtcttggcccctggacccggcattcgaggccttccgagacattctgcccttggaatgcttgcctctcaattgatctgtcctgagtggcttgttattattttttaatattcaatcggtcatgtatcagtagttatgcaaaatgtggcaaaaatgaatgactgaagaaaaatgaaatggaaaaagaaaaaatctgaaaatacacaaaataaaagcgcacactgttttgccattggattcaacagacctgaaactatccttgcaggagcccctcggtgcccacctgtaggccacgctcaccagctgcaccagagctgtgcttccagcacccaaaagctccctccctgagctgcacccaggcctgctccccactctcctcaccagctgcacccgtatctcccacggcccacccagggtactatcgatcctttagtcctcttctgccagtgtaccccatggcccgggacaacccctagtatgcaatggctctttcttgtgggcaatgcatggaggcacacatcagggccctgcttttaagaaggaagtactgagacctgggtgccgcctcttctaggagccatggatgccggggcttacccccagagactgtgaattgaatggttaggagggagcct

SEQ ID NO: 94211 - DNA, 55961 bp, Homo sapiens
  misc_feature (1)...(55961): n = A,T,C or G
gagtaaacaacctgtacacatttagggtgggtattttgaggcaatgtcttggtgactttaggagactggggctcatgaggaaataggaccaactgaaaaactgggaggcagtttttgagataggtaataaatgggcaaaccacagctcttcatgtcttcatagaagctgcagctggagacagcggcacctgggaccactgggtgaatgttcatggaggagtcattggcagataggacttattctcagatgatgggcctcttgtgatgaccagcatccctctctcccttcctttcttcccttcatgctagactggtgcaggctgtctgcagattccctaaccactccccttccccacccctcagtggcttgggcttcctctcaacrtggtgtctggctgtctgcagattccctaaccactccccttccccacccctcagtactcaacaacatagcaggagctacatacccacagttgtccttagaaattattttatgtaactatgataaatgcccttaattcaactgtctcaatattataagtctaatcttcaataaaatgacaacattcggtaataatttttttttcatttttactggtacacattccattttagaatatttgaaaatcaaaatggaataactaaaacacaatgtaacctctacacactgctgggctgggtaaatatctgttcatgccaggggtaaagcagaactttctagaatcttctgagatggaagaaggaggggggtttacaaaccacacagccccttctgcccacccctgacctgaccatcctgtcactgaaggaaatgtttggatccatgggctggagaactgaggaaggacgaaattgagatgttctacctgtactaacatgataatagtgataacatcattcaaaatttctccttctagtcttttttcctgtgcatagttatatgtagttgtagctgccgtgtggatataattttgcactctactttctcacttaaaattattatgtagatcatgaatatttccattttgcgatataatcttgataactgtaacattcttgctgcaaaatatattctaagtggattcagtgtgatttacttaacactttccctcctattgtaaatttaggttgtttccaatctttaactaacctttagctccagcctttttaagagttgatccaaggtgctctaagtgtgagggacaggaacaagagaggtgatgaccatctccatgccagcctgttctggcttggcctcttgtctcagcaaaagtttcttttcttttcttttcttttcttttcttttttttttttttttttgagacaggatcttgctctgtcacccaggctggagtgcagtggcccaatctcagctcgatgcagcctccacctcctgggttcagaatcctcctggcaggattctcctgcctcagcctcccaagtagctgggattacaggtgtgtaccaccacacttgggtaatttttgtatttttagtagagatggggtttcaccatgttggccaggctggtctcaaactcctgacctcaagtgatctgcccaccttggcctcccgaagtgctaggattacaggcgtgagcccagacccagcatcagtattaattgtgatccttccacttacaaaaaaaaaatctacaaccagacagtaaggtatttgatctccctagcaataactccattcagaaacagaggcctcacagaaagctgcatgcaatttcagctaaaccactcccaaaccacatctgatgacgtgtgtccttcaagtgggatcagttgctgtcactgctacaaagagtttctgaagcctcggcccaggtcagtgggttctgaaatccggacaatcacgcccaggagacgttttctcacctcccagggcaggacagagaccgcaactgagtctgagacccagcaatgcagccggcgtggggcatcaggtagagaagcacggagctggcacagggggtccccgctgggtgtggaccccagctgggcctcccagcacgtggttgagctggggaagctgctgggcctccctgagactccgtttctacaccagtgaaaggggtcagatgaaatctgagagggcctctgtggaagttaaatcaaacatgtagagcctgccgacctgcccggtccctcatgttagatgagctcccaggactttacagacagacactgtcatccttctcgccttatcttaaaaatacatacatacatataaaaacaaacaaaaaacacaaacaaacaaacaaacagacaaaacagctggatagagcaaggtctcaaaacaaaacaaaatcaaccatgaaaccagggcaaataggccctcccgtcgcagctgagattcccactgccagggcacccacctgagagcacaggcccccagccctctgcagacgcactcgtctgccggtcgcctctcggggacccaggcgtgcaggcacccctactcttttagctcacgctgtcaactggctctcccgcagacaaccccaaatcacccgaccccaaacctttcaggcctgaaactgtttccacagtggccagaagagttatttttcagtgaaaatttctaataacttagaaaaggtaaaaatggtaaaagaagttaaaaacaagaagtcaccatgacggcacccagagtgaaaggctttcctggagaactcggacgctcctcaagttcaaagccaaaccaccagcagcagcggcagcaaggtttacaatcctaaaccatgcaggcttccggcgtaatctctcctgtacttcgccaccactacagcctcaccgctggacagctcggccgcacacacacaccacacacaccacacacatcacacactcacagacacaccacacactcacacactcacacacacaccacacatcacacactcacagacacaccacacactcacacactcaccacacaccgcacacacacacacacacacaccacacaccgtacacacaccacacaccacacacacctcacacactcacacacaccacacaccgcacacacacaccacacaccacacacactcacacaccacacaccacacacactcacacaccacacaccacacacactcacacaccacacacatcacacacagacacaccacacacacacacacagcacacacacaccacacaccacacaccacacacatcacacacacaccacaaacattacactcataccacacacatcacacacacatcacacacaccgcacacacgcacacactacacacattcccacacactcatacaccacacacaccctcacacacacaccacaaacacaccacacacacaccacatcagtcacacaccacacacacacaaacaccacacacacgcacacactacacacacaccacacactcatacaccacgctcacacacccccacacacaccacacatatcatgcattcacacaccacacacaagcacacacatgcacacacactacacacacaccacacactcatacaccacacacacgacacataccacacacaccacacattcacacactacacactcatacactatgctcacatacaccatgcaaacaccacacacaccacacaccacactcagacaccacacattcacacaaagcacacacaccacgctcacacacaacacaccacacacaccacacactacacacaattacacacactactcacacacaccacacacacaccacacacacacacaccacacacatgaccctcacaccacacacaaaacaccctcacacactcacacatgagtgtcacacacaccatacacacattacatacacagcacacacannnnnnnnnnnnnnnnnnnnnnnnnnnnnnnnnnnnnnnnnnnnnnnnnnnnnnnnnnnnnnnnnnnnnnnnnnnnnnnnnnnnnnnnnnnnnnnnnnnnnnnnnnnnnnnnnnnnnnnnnnnnnnnnnnnnnnnnnnnnnnnnnnnnnnnnnnnnnnnnnnnnnnnnnnnnnnnnnnnnnnnnnnnnnnnnnnnnnnnnnnnnnnnnnnnnnnnnnnnnnnnnnnnnnnnnnnnnnnnnnnnnnnnnnnnnnnnnnnnnnnnnnnnnnnnnnnnnnnnnnnnnnnnnnnnnnnnnnnnnnnnnnnnnnnnnnnnnnnnnnnnnnnnnnnnnnnnnnnnnnnnnnnnnnnnnnnnnnnnnnnnnnnnnnnnnnnnnnnnnnnnnnnnnnnnnnnnnnnnnnnnnnnnnnnnnnnnnnnnnnnnnnnnnnnnnnnnnnnnnnnnnnnnnnnnnnnnnnnnnnnnnnnnnnnnnnnnnnnnnnnnnnnnnnnnnnnnnnnnnnnnnnnnnnnnnnnnnnnnnnnnnnnnnnnnnnnnnnnnnnnnnnnnnnnnnnnnnnnnnnnnnnnnnnnnnnnnnnnnnnnnnnnnnnnnnnnnnnnnnnnnnnnnnnnnnnnnnnnnnnnnnnnnnnnnnnnnnnnnnnnnnnnnnnnnnnnnnnnnnnnnnnnnnnnnnnnnnnnnnnnnnnnnnnnnnnnnnnnnnnnnnnnnnnnnnnnnnnnnnnnnnnnnnnnnnnnnnnnnnnnnnnnnnnnnnnnnnnnnnnnnnnnnnnnnnnnnnnnnnnnnnnnnnnnnnnnnnnnnnnnnnnnnnnnnnnnnnnnnnnnnnnnnnnnnnnnnnnnnnnnnnnnnnnnnnnnnnnnnnnnnnnnnnnnnnnnnnnnnnnnnnnnnnnnnnnnnnnnnnnnnnnnnnnnnnnnnnnnnnnnnnnnnnnnnnnnnnnnnnnnnnnnnnnnnnnnnnnnnnnnnnnnnnnnnnnnnnnnnnnnnnnnnnnnnnnnnnnnnnnnnnnnnnnnnnnnnnnnnnnnnnnnnnnnnnnnnnnnnnnnnnnnnnnnnnnnnnnnnnnnnnnnnnnnnnnnnnnnnnnnnnnnnnnnnnnnnnnnnnnnnnnnnnnnnnnnnnnnnnnnnnnnnnnnnnnnnnnnnnnnnnnnnnnnnnnnnnnnnnnnnnnnnnnnnnnnnnnnnnnnnnnnnnnnnnnnnnnnnnnnnnnnnnnnnnnnnnnnnnnnnnnnnnnnnnnnnnnnnnnnnnnnnnnnnnnnnnnnnnnnnnnnnnnnnnnnnnnnnnnnnnnnnnnnnnnnnnnnnnnnnnnnnnnnnnnnnnnnnnnnnnnnnnnnnnnnnnnnnnnnnnnnnnnnnnnnnnnnnnnnnnnnnnnnnnnnnnnnnnnnnnnnnnnnnnnnnnnnnnnnnnnnnnnnnnnnnnnnnnnnnnnnnnnnnnnnnnnnnnnnnnnnnnnnnnnnnnnnnnnnnnnnnnnnnnnnnnnnnnnnnnnnnnnnnnnnnnnnnnnnnnnnnnnnnnnnnnnnnnnnnnnnnnnnnnnnnnnnnnnnnnnnnnnnnnnnnnnnnnnnnnnnnnnnnnnnnnnnnnnnnnnnnnnnnnnnnnnnnnnnnnnnnnnnnnnnnnnnnnnnnnnnnnnnnnnnnnnnnnnnnnnnnnnnnnnnnnnnnnnnnnnnnnnnnnnnnnnnnnnnnnnnnnnnnnnnnnnnnnnnnnnnnnnnnnnnnnnnnnnnnnnnnnnnnnnnnnnnnnnnnnnnnnnnnnnnnnnnnnnnnnnnnnnnnnnnnnnnnnnnnnnnnnnnnnnnnnnnnnnnnnnnnnnnnnnnnnnnnnnnnnnnnnnnnnnnnnnnnnnnnnnnnnnnnnnnnnnnnnnnnnnnnnnnnnnnnnnnnnnnnnnnnnnnnnnnnnnnnnnnnnnnnnnnnnnnnnnnnnnnnnnnnnnnnnnnnnnnnnnnnnnnnnnnnnnnnnnnnnnnnnnnnnnnnnnnnnnnnnnnnnnnnnnnnnnnnnnnnnnnnnnnnnnnnnnnnnnnnnnnnnnnnnnnnnnnnnnnnnnnnnnnnnnnnnnnnnnnnnnnnnnnnnnnnnnnnnnnnnnnnnnnnnnnnnnnnnnnnnnnnnnnnnnnnnnnnnnnnnnnnnnnnnnnnnnnnnnnnnnnnnnnnnnnnngggcgcgggcgacgccagcccgggacccggcaaggtgaaagggcaagcgcgcggcggagctggccccgcgcgacaaggcgccggcggctgcggcggcggcggcggcggcggcggcggcgggggccgggggcccccgcgagagggcttctggcgccagggcggggccgggcccggcggtggcggcggcggcgggcggcagcctggtccccgcggcgcgccagcaacactgcacgcaggtgcgcagccggcggctcatgaaggagctgcaggacatcgcgcgccttagcgaccgcttcatctccgtggagctggtggacgagagcctgttcgactggaacgtgaagctgcaccaggtggacaaggactcggtgctgtggcaggacatgaaggagaccaacaccgagttcatcctgctcaacctcaccttccccgacaacttccccttctcgccgcccttcatgcgggtgctcagcccgcgcctggagaacggctacgtgctggacggcggcgccatctgcatggagctgctcacgccgcgcggctggtccagcgcctacaccgtggaggccgtcatgcgccagttcgcagccagcctggtcaagggccaggtaaggcgagcgcgccggggctgggggcgcggggccgagatcgggtctgcagcgccgccgggcgcccgggccccgtggtgagggccagcgccggcccctccggccatctcgctccctgctctgactacaccagcgccccacggggatgctccgagcgcctccacctcttttccctgagcgttttcttcctgcccctgctttccgtcccgtctctcccgtccccgtctggtctcagtctctgcccgtctctctggtatcggtctctgccgtctctctggtctctctagcttgctcattctctcctcatcccttcatagttctcttccatccctcttccttagcctccctctcccataccctcctctccctttcctcctggactctttctcctctcacccctttctctgtccccccatctattcccacccccgttcctttttcattttttccttctccaccctccctggctcccctactcttctttcccctccgtctcaccttttctcgcccctctcttgtctgctcctcaatctcctgtccctataatctctatgaaggtgagaactttttctggacctcaggatttaagtgtccaacctagctgatctcccacctccccaacccccccymcmcacacacacacaaggctcctccgcaggggactcgggtgggagatctgcaggtgggtgccgtggggagggacagctgcctgcttgtaaatccgccccctgccttcttctgggctgcctctcctggaaaggtggaaattttgctcttgggaactcactctagagaggcggcggtgtggtttgggcattcccttaagagacaagaccagacccmccccccccacggcaatgcctgttttcccctcagagcacccccttccttccccgaaccccttaggaccaccacctytggggtagacgttccaggtcttggtctctttcagacctgcttctttttcttcatccccttacctcactgccccaagcagttaaatcctttatcagggctaaagattttaacgaaatacgaaacgaagggccaaacagttctcctgagccttctcacctattgcatcagatggcagctttacgcaaagaaaccccaaagtacttgagagcagggtgagtgcgtgatggtgttawctgctcgaattatatgctgtcgactgcggttgagttctctggtgttttcctgaatcaatattaagcattacttaagaaaattacattgctgtgtgggcatcttttagatttatgaaaaaatcatcgttttctttaaaagaccccaaatgacctcggcttgatctttctacaggcggcctatcagaagccatcacttcttccctgcctggcactttcactgcaggctctttcacactaatcaaataatgcttgttctgccaatttcactaaagctggaacccctgggattccaaacaaatagcatcctaactccagcagagaaggtcaggtaattcctgacccatcctgccagtccttcttttctaaggtttaggttccacacatttcccgagttagaaatagcataggtgtaacaactctagaaaaacatcttcagctgagggaggcttagtgctttaatatcagaggtttattttccatcctgcagttacatgttgagtctgatgaaaggttcatgtgatagaatgcaagcatggggggtaggggatctcagttttatttttcaaacaggatttatacaaatgaagtggaagrattctttgcagaaatgccttggttatttgcttcttgaatcattgctaatcmgaattctttggaacagtctgttattgtttttcattcttcgcaatgaagatgacattggggatcaggggaagaggaatgtgtattcccttctgggatcacagagtcctaacattttagacttggaagagatcttagagatgaactggaccactgcctatattttgaaagatgcgagaaaacaaaggtttgaaatgagaaatggggattttttttttttaagagagagagggacctcaggaaattaaatgtttcctatttctacattaatgctgtgtataataataattcctttggtgcccatatgccaagcggcaatatagcaatgggcaatatataaaatacacgggtccttgtaagtatattttcttttctctgtatttaaaattgagattctaacrtacagtttgcaagtgagagatttctttattgaaagtaattatcaactttttcatttcttactttgataaaatcctaactgaacccattgccctccacctagcatgtcatgttatgttgtctattccacatctaaatagaggcaaaatctcagcactttttaaagtgcaagttcaatttctttgcattttttcatgctgcttccaacatacagctgtctaagagagggtaatgtgtggcatacataaaatattcaaaatgcaatgaaagaaaggaagaaatgaatagtcattaatgttttaggattctgtgcacaaaaggattctgatggtgtttcaggtaacctgaggttgattgtctctttatgtacttttgcaaattcactacctactggttgttcagagcacatatggtagttaccaaattatttcctcagttagaggtaatatgctttgggaaagcaatcaaaatacctgattaggtattcaaggagaactgggacagctaccaaacygataattactttaaaagggagagtcgttatattctagttatgttctgatacttctcgggatttcttttttaggatgcattttcataagctgcagagttagaaaaggctggtttgcttcttttatagaggaaaacattcactgctcagctgaactttgtgaattgaggatacgctgtttctatacttctagagaaattgtaaaacaattttaagagttttgtgtgtaacataaaaatatctgcttaacagttttgtgtacaataaaaagcttaggtttatcacatsatatgataaattcagtcatttcgtgaggcttttaagagactctctggcctgtgttaccaaaatctcttgcatgttgctgtctgaattctggttgtcttaaattaaattaatatataaatttcctctatgatatattctatgtagaaataatgatatacatatcttccccctttgtctattactaaaccctcttttgactagaggcatttttaggtaactcttagttttttataattggattttaaaactctgtacttttagaatgaactggtgaaaatgttaaaagtatacttttagataattatttgcatcctttattagttactgaaccaaaagaatacaacccacagctccagtgtaagatttttgcctttcaaaagctggaagatgttggttttgaaatgaaagtagcctgtaatcccagcacagtgcttgcacctagtaggtagcttaacctacaaaaactgcattttcggactctgtaaacctagacaaagtagcatcagcattggggaatgctggccatgaagagtgccagagtttactggcttccactccaggcttggagcgtgggacgatsgcgtgactggccagggaccttgttctgtcagttgtgtgtgcagcagcagggtccccaaaagctgcttgatggtgcactgactcagagccctgctttcactgtggctcrcctcctgagtgtcccctttttagttaattaggcatcgccaggggcagggaaccaaatggcaattgagtgacaattcctcactcctctcctggcccctcagagccaaccatacaattcggcatgcacacagtgttggtaataataactgcagcagcagcagcagcaggaagcatttcctacttgcttgtgccaaactctgggccagcagagaacataggatgtttgaggatgtttgaatctccctggttctgctcttttgatggtcgttgtacaggtgaggaaactgtagtttcacagagtcaggtggagtttatacagccacatgctctcataacagctcatgagtggcaaggctctgaaatttcatcagcatgagtaaaagctgttggaaatggcagtcgggccaggtgccatccaagcaccttgctgtttccaggcagtcgtttattaactgtgaccattgtgataatcctttctatccacagagaagagctgctcagccagccatccgcaaaagattcacagaacatcaggactaaagcatccttgagtcttaactgtttgaatttaaaattggaaagcaatttcaggacaagttctgtttgcctgacagtttctggatgttttttaataaaggaaacttgtctaagtgtaaggaaacagtaaagggctctgcagctcagctttgtgaaatgatatgcagtgatgtcactaaaatccaccttaggtctgagagggggccacaccatggtgtcactgggaagcacaagtgcacacacatgtgcacacacacacacacacacacagagacatacataaagcccatcttccaaaatactaggcctagaaatagcactttacttatgactgtaaaaccagcagtctcatcagaaagagtgacaaagatgaacagcctgttgggctcctaaaatctgtgggcttctaaccggctataacacagagattttttttgagacagggtcccctctatcacccaggctggagtgcagtggcatgatcattgttcactgtaatctttaattcctgggctcaagcaatcctcccatctcagcctcccaagtagttgggactacaggtgcacaccactttgcccagctaattttgtttattttttgtagagataggggtctcactatgttgcccagctggtctcaaattcctgggctcaagcagtcctcccacctcggcctcccagagtattgggattacaggtgtgagccacctcacccagccrtacaacacacaaaatgtttaaaggccctgtattaggttgctggggctgccataacagaggacctggaagtccaagatcaaggtgtcagcagggctcatttctcctgagtcctgcctgcttggcttgtagatgctgtgtcctccctgtgtcctcacatgaccttccttctgtgtgtgtctgtgtcctaatctcctcttcgtgtaagaacacagtcagattggattagggcccatcctcctgacctgactttaacttaattacctcttaaaaaccctgtctccaaataaggtcaccctctgaggtgctgtgggttaggggttcaccatgtaccttggtgaagggaggagaaacaattcagcccataacrcaaccaaacaggcatttcttaaccagttgctcatcttgtttctgcaactgctgtgctagtttgaaaagcagtagatgaagccacacggagggaggcactggatggagaatgttgcccgcagctttgagcagagagatggctgcacaccyggagggaagctagaacarcctagagcaaaaatagtgactggcaggggtgggtaacgccatctgattcgtccagggagacgtggatttttggtagcgtgcttatgagtcactgtgttgtgtcctgcactgtgtacagggcacggagattattgccaccaccgatgactgtgcagcttgaggtatcgatacactggactgttcagaggaaaaaatagctacttgttcttctatcaagtagggcaggcaggaggacacaggcaggactgcatcctaaaaatagccccacacccgcttggagagctccagcagctcagccyggggtgcatggggcagctcctggtagaagctacttttacttcaccatgagactttgagaatctgaacttgcaggaagagggttgtagtgtatttttgtatacttttctgatttcccttaagcgatgggggagattgggttttctctgtaaggacagtgtaggttcatggctgtttcttagtggaatgtgcccatgtggacactaagctgaagtctgaatgaaggcctgacacccacaacctggtcagtgtctcccttctcatcgtcaggaagagactcgtccacacccaggtttagaaggaaggcagcctcactagtaccatgtcagaggcagataagacaccagcagaaatggcttttatagttcaggaaacaaaacagacacttgtggcagggattttgagccccactttggagctcctagaatcagaggttgttgctgccctagatgtgttgatgtagtcgggaggggagaggacggctggccacaagtgttagtcctttcttctctgccagtggttcccaaccctggcagcacattagatgccctgaggagtgtgcagattatttcagtaccagggctgtcccctcaaagactcagactttgtggtctaggatcaggccctgacagaggctggtccaaagagctcctcatgattctaatgggcagcccgggttggaaaagctgcctgacgctggccatggtccacctcctccctccccacccatctggcagacacagccycacccaccagtaaccacagcccagagcttcagaagtggtgataattaatccccccaacctccccaccccacctggctcacactccctgtcctaggtcaaccctgactcagcgccttcaaagcccgacttctgtagagatgccatcctaaagccagccttcctccctggactgcttatgtagactacgagggagtgtaaaccctgaaaaagaaaatgtagggatgattccctccaccctcgatgagacgcagctgcggagggtggtgtgagcagaccctccagagccgtggctgacaaattaatacagcacgggaatcgagtgcctcccgtcatgcaggaacttcctaggcatcattgggggatcagatacacatcaagtgcctgccacagggaacgtaccctctaatggggagaagacaaaacccttcacatttgcttttgacgtgccaagtggcttcacaagtatctttttgttaatatttaggaaatatccatggatctgacaatagacagtggcctgggtatatagtggggacatgggcacagtgggrtcctgggrwcagcagggtcttcagaaattccaagtgatgttcttagaggaaacactctacttaagggtgattgagactcgacattaacatggggcattagtcactcagtgttttttggaatacggtttcattgctgataaatggaaaggccaggcatgcccccacactgaccaagaagttgtagtaatggcagaaatgtttccrgtaatgtctacactttcctactcagtaagtcggcaagctaagctaaggtttaattgttcagttattttctcattgttacacacatcattcattcattcactgagcactgtagtgacgttgcccttggcattcccatgacgacccttccccattctgcgtaacgtctgcgaccctcccctggtcctctccctggcctgctaatcccacaaggctgggaggaaaccagctgagtgggaggaccaaggacaccggactgggagagcagatttgggaccaatcaggtggcaraggattgtgagatgagggcaggtgtgtctgcagaagccagaagaagctgcccgaccttgccccttacctggccarcasggctgggcatggtcagggagccacactcaccgagcctcttctattcctattcttcagtgctaggctctcctctcccgctctcttcctctccagccctgtgctcctgcctcgtgggtgcctgtcctctgcttggattcctgcagtgcccccatccagtctctctgtccctgtccatcctccctgatgccacctgcatggctcctctaaaatgcagacctagctttatcacatctggttatgaaccttatgaaatagagctcaagtttcccagcactgtacagccatgatggcattcctgcatccgccacagcccccactgaggctcctcttccaccagccccttctgcctggaagcccctcttgcccatcttcaccaggtgagtccctggccatccttaaaaaccctgcccagatgccccaacttctctgcaaacagctcctcaaccactccttcaataaaagcgatgacttcctcctctgaactgcrgaggaggaagctcggcattgtttagaaaaagttcatttctgtgcttatcctgccagtttacataattacaactgtattgcccyttctctttgctaaatgtccaacactttgtttgtgccaaatagatgtttgccacaagatctgtttccctgagcagactccccatcctcttcattttgccccttcttgcgatgcaagaagtgcttactgtgggtcagctgctgtgcagaatgcttaatgtgaatgatttgattaaatccttgtagcagcctawgargtaggtgctgttgttattcccattttacagaggaagaaactgaggcttgctgaggttgaatcatgcacagagctgagctgccaccaggcaaccagtccagtgccagagccacctggtcctgaggaggtgtctagttggcaagtaccacgtgtagcattattgttcctcatggcacatatggatgttaggaatgcctctgcagttccatggtgcatggttttcctacaatactcagaatcaatccacgagaggacggatggtgcatccatcaagtctgacacatggtacggaattatcagcaacgttggacaaatatattggcccagattcatcataagctccttgtattgattgagcaaaatcgatgaatgtgttaattgcttcaaaccgtaggagaaagataattattacagctttatttattttgtatatgaaagggaaaggcattttagagattctgaaaataactcaagaaagaagtgctttttgaacataattgttacattggtaaaatcactcagattgaaggaatgkctaccttaaaataatttctctaaaataaatactaattcttcatcacagtatttggcaggcattctcgaggtgtttgactgagttctttgatgaaggagctaaggaaatactgtctggtaaaggatcagttacacgtaaagttgaattgtcctcagctcacttggaaattgaagggaaaatttccagaaaaatatttgaagggtaattctcattttttgatcttgaagatcagacatttgcaaatatcagaatatggagttacagaacttattacattttggttctaataaaaagctgtgattaatattttatgaatttggacattttgtgcacaaaattattaaaccaattatttttgccttacggatcaatatgtatgtattagggtgattacttagtgtcagattgggtgcccatattgcttcccgtaagatgtctgtcaggaattkgatataactataccaagtaaagatcaattgctgctaggattaatttgtgctggagtccctcatgattagtgacatatgctactcaactctgcttctcagccaaggaaaaataaaaataccatagtggaaacttcaccagaattgagtgagttacaagcttaaattaactgtaactagttgagtattagaagcctttaaaatgtaactttttaagagtcatcaaaatactaaatgaatcataatgtatttaacctggctttgtgcaaggaggctgttctttatcagagccctctcctgcagcgcacatgtgcctgcgtctgacagcacctctcgggtgggagccttcctcctccaggttgggtgggagagaagagcacagcaaagccaggggccttgtccacagtagcgggttaggatcctccaggggaagtgccttcatccaatgtgaacaatgcctaaaactaatgcaggagagctgcagagactggtggctgtgaccccacccctccagagccctgctgacttcctttgatctctttcataatgtaccctatgaaacatcattatcttagagaactcatacaagactgctactctaactataaagataaaaatttcacaacacttaaaggacattaccgtaagtcacaaataaaactgatctaataaaaagtgagttggaactgaattgaattaaagtgcttattttattagtaatttcatttaagagggtatcctggcatctgccttttcataagagagatagagggctcttggttattcttgatgatcggtcaaagagaaacaggtgaccaaccacaggagtcccttcctgctgccccaaacccctcgaagccacctggaggactgcatggcctcgaggtgtctggggacacctgcagactcctccccagaataacgtctttcgttgcacaaaacaaaatgcataggatttcaaaggaagccaattatatttaaatacagttatcagaacatgtttttaaaacatgatgaactaaaataaattaaaaagcactttattaacacattaaatattaagatctagaggcaggtctaacactctcctaatctgacaataatgaatatcaatgacatttcaaaatatctacaacaatatcacaactgtaatgcgattttaaaacatttgyctattggtgacaaagccaaggcattgctaatactgctgtggtttctttcaatcctaattataggaagtgctgaattgcagttcaaagttagtgaaaatggagacatttttcccatccaaatatatatacccsgaggagtgcatgggccccaggttaagaactcgaggtagtgtgtggctctaggtggtgatggctgtcttgcgaaagatcctaaaccttattctgcagctcagggccagagcaactgggatcaagatttaggagcccaacaggtgtctcagttctctggtgttattggtgggtggggctgggataaagctggagatctgcaggcagaggcaaggctccagcgccttaccccttctgagtgtggctcactcctgggcaggcacccacctccctgagcatcagatgcctcccctaaaggcaaggagcataaacccaactgctcacatgaatcatgaggatcaaaggaaatgatgacacgtgttccttgcataggtaaggtgatcaatagatgttcctgcttctaaagaagaaggagatttattgaattaaatgcacagaaatgtatggccaagacacagcagcctccaatgcacacagatatctgctttcataatgatgagtgtttcatggcaatattcacctccaggtgcctcgggtgtttccgtccatgactgtgtttttacagagattcacaggaaactcagaagagcctcctttttgccctcataaatctactgctgtggacgcttgctgttgcctttgctgacatgccatcatcaaatgattttgcaccatcaggggctgatttatgggattatgttattgttccagcacagattgatatctgggttttttcacctctttaactttggtatcataagaattccattacattggtagcatctttaaattagcttgatttcttttgctggcgttcagttagaaaattaygtagaagaatattcttatttaaaacatttacctctgtgctccctaaatgcacatcaaaagtccttgttagccattaaatgttgttgatattcattctttgttacagaatgcaatgcccacttgaaaacttcttggctaccattttgtttcaaggtgaaaaacyggttcataaatcaaattttaaaatttgtaaaaagctgtggaccccagcaattatcacaagtcacacagaatgaacatcaactgtttcagtacaactgaaagagaatttccctgtagtcaattacatggatcctttctaatattaatacttttacgaaagatcctttctttagtagaatttaagagaaacctagctgaaatattcgacctgcaggactagccaagtttctcagaaacacctgtgatatgacatatggtcttactgcaattggaggctattcaacagtggaataccaatgcctgcttcacattctcttaactggtcagtcaactgaggccttgagcattgacccaaaatctagggtgaggctttctgcatttgggaagagactgacyagctatctctagggttctcccccaatctgaagacttaagtgggtagactctgcattctcatgggacagagtgtgggatacagckaactgatcctccaggatttctacgctgtttttattgtattcccagtgattttcccatagtttagaaatattgaaatgtcctcatctgagatgattataggcagaaagcatcctcctatccccagtgtttttcagcacccaccmcccccccccgccggcatatcattctaggaaggaatattatcctttatgtggaaatggagcctgcaatgatatctaaatcagttcctgggcctgggtggtgttgccataactactgatctaggtttgtaatatcagcaaatagaaacagacctgccctacagtgctcagaccatttgttcatatttatttatgtctcctttttgctcctgttaaacacattatttagctgtcacgtaatcttttagtgagatgattccgatcaccctatcctgagaaaaatcttaaaggccctccatccccaccttggctccagtcacacaccgtttagaggtctcaggttcccactggtttcccagctccaccgaatgtcccatttggataagccgcaggctctcagccctcggcgtccccagctttgttggaaaggtgaacacagcaggctttgcagcagctgttggtcagcacttgaccttattggccatgatgaaggccagtaggctggacaagcccaagcgagggtgatggtcgtttaacctctacaggcctttcagaccaccccatgctgtctctgtggccagaagatgctccgagacttcagaactgggtcttggtcaggactcgaccagaaaagacaatctcaacctaggactcaagacccagatgtgggaggaggcgtatgaaraaagcagccaatgggctaccctgagagtcagggacctggtatcaagaaaggagggggatctgccggcagctgcagggccaccattgagggtaagggcaagagcaaggcaaggcccccaccccagatttgcattcagctttccagtggacggggcatgcaagctttcccagaagcccaggcaacagagggatcctggactgaggagtgaggccagttcctgtgttctcatgctcccgagggtggcatggctgaagcagaccagtgctcctcaaggagctgccagggcccagctcctcctgctcctgcttagtgagaattgcccgggggcatcttccctgtgctgcctcatgtggaagcatcatcaaggaggagttgtcaagtgccaggtatgagaggccactaactgccgggcttgacagaacgacctattggagggctcaaggaagaaaaaggccaccctcactcagcgtgcacttagggcagaataagcctcacccaaaatccctgtgggactttccccatagaattctatggaaacttccatacatcaccattagattaagttgcccagggagattgagggaaatataagatttctgctgcaggaaaaggaatctgacatttccggcttctgaaccaagcgtgaaaggctgatttgtaatttgtttggtcttaacaaaaataatagtgtgcaattaactaaggcgtcaagcacagttggagtgaacgataaacggaaggcagcattttccataagtaaaagctttcagagtgtgcatctctaaatcatccayttcttcgctactgactcttttcctttcttttgatgttgttattttcttgacataattacagcaaagattggtacattgcacccaatcttaattgtatctcccttcagtctcatttatttcattgttacctgctattcctttaaattagtaagtcatgatgtttacagattggtagtattcttaaaaatatttcaaattgtgctagaaggtttcaccctgaaatggggtgagtacattcttttatttattctagagcttgcaaacatattttaagtgtataatacagtgatcctaaagaaaggctggggaaagaatttgagtttggaggatagcagtgaaaagagggycacatgaacaggtgaagaggaggctggcrtgtccttggtgcagggccttgggtaaggaaggtgctaagtaaggaacagggtggtggcctcacttttctgcgtggtgcagactgcaaacgcccttgattttttgatcaccaccccctccccacattctgtgagcagcaggacygggagcgagaccgtggtccgaagttctcccgaaacccaggtaggctttgtatttgtgctgttattattattattattattattattattattattattatwattatttttgatgcggagtcttgctctgtcgcccaggctggagtgcagtggcgcgatctcggctcactgcaagctccgcctcccgggttcacgccgttctcctgcctcagcctcccgagtagctgggactacaggcgcccgccaccaygcctggctaattttttgtatttttagtagagacggggtttcaccatgttagccaagatgatgtcgatctcctgacctcatgatccacccgcctcggcctcccagagtgctgggattacaggcatgagccaccgcgcccagcctgtgctgttattttgcaccaaatttttgtttcagattattctaagagattttttttttaatttgagacagagtttcactctttttgcccaggctggagtgcaatggcgtgatctcagctcactgcatcctctgcctcccgggttcaagtgattctcctgtcttstaagggcttttttaaaaacacaaacacaaatattgagaattacgtaattaagtagaattgggaaacaggcctagcaaacaaggtcagttgtaaaccaagacctcagtgatgcttttgagctgttgagtgatgttttgagctacatttggcacctgctaaccactcagagaaaattatcttcccaatacatgagtgttttaggtcctgcagtaggaacaatgaaactacaaaagatttacaatcccatatcaaaaaacaattccaaattcaagatgacaagatgtctcacaagtcgaaaaggaacgggaaatagctcccagtgcattcccatagaatcatagcacataccttgtggttttgtttgttcctgtgtctgattaggttctgaaggtctttatcagaagtagctgatttccctgccttgtagttgagggttcttggcccctgctagctgcacttcttaattagaggaacttgaacagtttctggaggttggaaagaaaaaacaaggagatgacttrcggcgctcagagccagtaacatgctggcagccagcaggcctgaaaggggcagcagggagggccgtgtctgccttctctgggcttcaatggtgggtgacaccgggtgcctcaggtcaccctcagtagaattttaaatgccttaatgacgtttcaaaaatagagattcatttggacttagagtgcagctaatttctgctccgggtattttaacctcttgcagtcaacagcattcgtagctctgcagggccatctgtgctggtcccttgataagaagctacaattcaatggattaccaatagcaccctcatgtatgactacagaggcactgtcgccaggctcaggcactttttaactataactagcattttagtttttattctttttttttttttttgagactgagtctcactctgccaaccagactggagtgcagtgcacaatctcggctcattgcaacctctgcctcctggctttaagcaattttcaagcctcagcctcccgagtatctgggaccacaggtgtgcgccaccatgcatggctaatttttgtatttttagtagagatggggtttcaccacattggccaggctggtctcaaacttttgacctcaggtgatctaccatccttagcctcccaaagtgctgggataacaagcatgagccaccacgcacagtcagcattttagttttcttagacctttaaaagcaacaacaaatatttagaattacataattaagcagagttaggaaacagagctggaaaacatttagttttcttaaactttgtcttaatggattgcagagccaagtgaagtggcagacagtaatgaggctgagtctaaatagaagtgaatattttaatttcataacagaaaactgggagatgagcaaaaagtaattttctccaagacccaatctcaggatccagtggttctcaacctcggtttccactccccagtgcctgggggtggagggcgctttgcacctcgtttcaacagggactctkgggggggctctgggatgcttcgggtgcccctctccgcccccagcaattcagacacagctgctctgtgtcctggaaaggaaagagccctccgggatgacccctcgctcacttcctgcgtgggaatcgctgctggaaatggaccctgatggtctaggcttccggaggccagctccagggcgcagcagaagagctgctgcctcaccttaaacctgcctccgtgaggacggaacctggactcctcgccatttctgcatttccacgtttgctttttaccccgcgcaaagcgtttccactttctcctctcagtgtatttgctcccttccttcccccgacaccagcctgtctccctctgctgcccaggggccccaggcgacctccctcscctcacactccccttgcaccctctatcctcccttcctgcccctccctcttccttccctctgcccctgccaccctcccagggccctgagcagtgcggggaggcatggagrggctgaggcctccccactgactcggcagccacggcgatgcagcgcccagcgtcttcacggtggaactagccacttcttcccctccctgtttcctcttccaaaaactggaaccagggtcacctccagtccttgtcagcaccaggcagccatcatggggagcgaactgctcagcactcaggaagtgtgagctgctcacgagcccctcacaccccaaggccaggtgtcctgttggagtccccccaacccatctgcctcctcccacagcctctccccttccccacctgagagcaggccacctgcagctggctgtggcccgtgggcctcctggggggctgtgtcctgtctcccaatctggggctggacgctcccccaggtggggctgggcagtgtggcccctggcgggcagcaacatggggcctgccggaccagcccagccctgcgcctagtaagcgctcagcacctatcggagaatgaggttgagttgatgtccttcaggcactgctagatcatgaaccatcagagaaagacgaagggtgtggagtgcaccttaactgcagtgtcaggaaagtggacatttttagccacaaagccagggccgtcaaarggctttctggtgatgctgactgccaaaggcatgtcactccggccctacatacatcatgtgaattatctttctctaaacactgaatttattggtcagagtgttttagtacgtgagaataagctttatggggttttgtttgtaatcacgtgcccttgaaatgtcatcataccattcgccagaaaacacaccagcaggacgtttgagagaggtttgtattttgagtcaagaggcactaaatggaggaggctgctcactgttctgggcctgggactgtcacccggcacatgaggctttgctgtttattttgttaagtaacttaatgttaggggtgtcatttaaataacttctctgtaaacatcttttcttttatttcattgtagtccttccctgattgaagatttctatgctactgtgtaaattcattctcttcccacaatctctctgtctctctctgcctccctccctccctgctctctctccctccctctcctcccctttcctccttccattcagctgtgacttttattcttggagcctgcattatcctacattatttgagagctgctaaaacaaagtccccacaggctgggggcttcaacgacagaaatgcattctctcgcagacttcctggagaggggaagtctgagatccaggtgtgggcagggctggatcccgaggctgctgcttggcttgtagacatcatcttctccctgggtcctcacaggatctgtctcctctacgtgtgtctgaatttcctcttcctagagggacaccagtcctattggattaggccccaacctgattacctcattttaaggtaattatctctataaagatttctatttccaaatacagtctcgttctgaggtgctgagggctgggacttcagcataggaatttgagaggacacagctcagcccacaggagagccttgctttccaagcacgtatgagtttgtgtcatttgtcttctttcctgcagcttttgcctctcagatgtcctcctgtttgtctttgccgggggtctctgccctgcgggccccaccgccccagcctctccacccgcgccccccagactgtgttccttcccatccccctttgttcctgcagcatcgacacatycctcctcacaaactttaggttttgcaggtttatctgtttttcttagctgtcccagaattttttctttcttcctttttcagatcactgtatcgcctttatctcttacgcctgacttttccctccgccttcaggattcttcctgccttgtctgctgggcctctctccttgctctcatccagatcaatgaacagggactcgatccatcttctttggcacttttcccatttccctgtgatccctggatgacactattttttgtctcactttacctttcaccgtctctataaacctcccccgtccctgttctcatgctgctcctctgcatgtgtccaaggttaacagtgttcctttctctccttcctttccagccactgctgtcttgaaaatgccttgtcctggttgagcgagccccctgccctgttccctcgctctggtttggagcatcgcctcaccactgctaactgctcagggaagccggtcatcctccctggagctggagcaggggcgcggggtgggtgaagggatgctcctgctgtgtgcactggcctgaggacagagaaagagggcaaccggcaaagtgagagtgtggaggggtggagtcaggcaggcagtgcagacactcaggcgggacaacagacacgggctgactggtggatccttatttcaaacagccgcctggagcatcagtgaaacttgaaggtggctctccagtgaggagctgaggctgaaatgatcatggggaatcttttcattccattggatttgatgctgatgtaccaagttgatgctttttcttaatcaccattttcatcattttaaatgttttaccaaatttagatggaagatgctttctgaaagccttcaattctacttcttagragaattttactcagttaacttatagttacttccggaaatgattattagttgttaattttattgatcaaattgtttgaaacaagcacctaccagagtgcttgtttgggggatacaccagaccagtcacaaggcgcatcagagaacagttatgttccatcatgtgcactttacgtgcattcttgttttactcagaagtagacaaattcaytaaaatatcctcaattatcaccaccggtctgccacaagacttgagaagagggtagaatggccttcttcatgattcctgcagaggctgacagacttgtgcgtgcaaccagcccgccgcctctgcatctcttcacgttcttcttgtttggtcagcctcctgtctcttgcctccttggaatcttgaactctgcaagagcagggccgacttggtttcctccaccagcattgatggagggcagcaaatctgcctgagctttggctgcgtcttctccagatcaattgttatcttcatgtgtccagatgcacagctgggcaggtaacacaaagcatcatttccatgctcaggcacccaggccaatccattccagatgcttcatgagttgagggattttccataaacttcagagatgtcagagtccaccaaaatattataaggctgggttctttatatatatgtatatgaacataatctatattttatatatttatatctaaatattctaatctatacatatttatataatctaaggcttatatatataagctatggtgttgagctacagtgttcatattatatatatattttttatatatatgtaattatgtatatctatatccttagattatacatatatataatctaagtgtgtgtgtgtgtgtgtatatatatacacacacacactaaggctctttgtaaaatgaaaatgtatgtttaaagtagttatataaatttttttattcaaacagtatacacttatatgtttacatttcaatttcaggatgacacccctgactttcacaatgtcataatttaaatgatctatagggacttttttcttcctctaagtgctcttaacccaaaaaagccaattaaatggagaacaatataaatagattttctctgttgctgccaactttgatctgccmtcatgacgataacaatttattagagaaggagatggctctaatttggttcagtttaacaaatgttactccgttggaatcagacacccctctgtgatgagagtgaacacagaggacattcggtgatggtgccgggcgggaccctgcaatggtctgtggcgattataagacaacagcgatgccggggccgcagtgttcagagcccagtggcggctctgttgtgtggaccaacactgaacgcagagctcctctaaaggctcatggttatttagagagcagaacatggtgtgatgactttgacctctaaatgaaggatggacccctggaagcctggtgctccccagagggcttgtgcctttgtgcacctccaggtgatccatgtgtgtccaggcctgcaactagccaattatataatgctatgattgctcttactattactattatcattttacagtgctttggtatttcatgaagaggccaggaaaagcgtggattacgtgactgtgtgcagaattataatggtatatgttatgttgtctaacctgtaaaactcttaagaatttttttctgattatagaaaatagtacatgctaaggtagagaatgaaaagtttcatgattccacctgttagagatactggctgtttttctgcacccgtgaacacacacacatgcacacacacgtgtgcacacacacacttccacaggcatacatgattttttcagcagtgggmccatgctgttcaggatagtctgaggtgtgcacatcttttctcataaggtccctggacatattcctggtcaactaagtcttcaaaaggctgctgagcccccaagggtgcaggstgatgtggacgtctgagccagccctgtcgggtgacagttaggaggcctccagttcttccctccctaaacaacccacggggactgtcctgtgtatcatgtttgctccttgtaccctaattaccatagggaaactcccagaagtggggtactggatcaaagggtgggaacaccctccatattgattggatacagtgctgccaaattgcccttcagaaaggttaccccaggttacagtcccrtcagcagcaggaggctggaaacctcccaggcctctccaaccctgatgatttcactacttcccgatctcactggcawagcatatctcatcttttttggcttacatattttctattttattcaggtgtagcatctttcatacagttgggtttttgtattttggtagggatggatttagggaatgggttttggccacttgactttctcattttgcccttggtccatttttcgtttgattgttatttatcttattatctttaggaattttttgtcaagtggattcccagccctcagcattggttatctcytgcagcatagcccattatcctaaaactcagtgtcttgaagacaccaacatgtcttctctcctagtttctgtagttgaggaatctgagtgctgcatgcctgggtgcctctggctctgggtctgtcatagagctgcaggggaactgcaggccagggctgctgtctcatctggaggtctgactggggaggattggttcccatgagcactcatgtgctggcagcaggatgcagtccctgggtggtgttggctgaaggcctcagttccttgcctatgggcctctccatggggcagctcacagcatggcagctggcctccctcatagggagctagggagagagagagaggttacccaggatcaaagctgcagtcttttgtggcttactctcagaagtgactttccatcactccgccatcctctgtgcaatagaagcaagctcaggtccctcgcactcaggggtaggaggtcaaacagggagtgaacgccaggaatcggaaatccttttgggacagcttaagggctgcctgatacaggagcataatattagctgattccgtaggtaggatcttgttttcattgtatgttcaaatcagttatggatgtatatataaactatcacatttttacacatgcataataaattctggcatacacgttcatgtaaaccacatttgtattgtgactttcactttttgtctcaggtgtagggagaggttaatgatatcccaccagtccatccatgcaaggcccatgggagcccattctgtttctagcagatattattagatacacttcatcctgtcaggtgtgtcatgtcattccgtgcatatgtgtgtttcatcagcccaaccagtgctgtcctctgtgccttgctctgaatcttagttatttcacccagaacttgggctggtgggccggctgtgtcactgtgtgtgtgtctggcccattgcttttcacacctgcatatttttccaagatgtgaattgatcacattttgctcatccactcccctggggatgccagcaatctcccacctccctgtggtcacaggaatatggctactcacctgcaagtggatcttctgggcttgatacccagctgtgagctcacaagagcacgagcctcggtatgtggattgtctcgaggtattgccagaaacttccagaatgcctttgacattctggaagcggccgatcgacacacttccccgcaaacacctggcatcgtcctcccctctgttttgccccttgacaggaccctagaggcatctaactgctgctttccttgtgctttcctgatgactgggatctggacatcacgctgcatacttgtcagccattcaggtctcttctttagacatctgctgatcttctttcccttccctgcattgtgtccgggttgtctagctttttcttctcaattttcagaaaatttttctttttccaggtattaattttttgtgcaagtgttagacatcacaaatattttctccccaaattttctttatcttcttctctttctcatcttttattgaggaaaaaaagccctccctaattttgaacaagttacattatgatcgaggctgtttgggaagaccatttcctcaccgtcccatcacgaggcatcctcctgagcctcctcccactggctttagagcttttcctttcacattttggatttcatccatcttgagcccttctccatgtgagctgccaggtagacacccagcttcctttctctgcagtaaacacttttcttggccccattgtctgaaccacctggtcttttcccacggctttctgctgccattgttatcccatgacagtcccatgtaaatacaattctctcttctgctcagttccccaattttcctgctcctgtacaaatattacactgcctttaggaatgcggcctcctagtccaacagccaacagactacaaccccctctgctcttccttttcaaaaccatcttagctttttgtggaccttgtaatttttcaattatttgtcaagaaatttactctgatcagtgaactctcatttccacacaagagcgtaccctgaaatctcagcagtttaatacaggaaacatatattctggcacagagtctaatacaggccagtgtctgctctctatctggagcacacagcctccaaattcacagcagcagtgggtgacagcagggtgaggggagcatgtcagcatcagcgcccgactgtctccacccggaacacacacgcctccttctgctcaccacccactggccagaactggccacatggccccatctgactgcaagggaggcagaaatgtaaggacccacatggctatttgtggagcattaacgctctctaacaaatycagttcctcaaaaatagctgagcctttaggattttctatgtaggcaattctagcatctacaaataatgaggtcaacagaaagtcacatcccagtgacgcagaaaamctcagtaccgtaagagccaggcaaacaaagccagcacaaaacttatttttgctgcttcaaatatggagattgaagaagcttgattttttgttacctttgaatcttaccacaagccaatgtaaatatcacaataacaaagccaggaaaattaatctgtaaaattgttcttatgccatttaaaatgtcaccaaatatacctgggattaacttttccattactaggaaaagggcagttttgatgacttacttcttagctccctttaacatctgatttagtgccttccacagtaggccctcaaaaaattattggctgcaaacataacatattgcatacggtcttttcagtaaaattgaaagattttactttgaaagtccagtttcctgaaaacatttaccttctaaaagatacttattgggaagctgagatcagaatttgagtgctggcagaagctttaagcctgtagggctaaaatgatgttgcctgtgcacgtggtgtgtagtgtacagcctgagggctggtacaccacggtctatgcctgcatgtggatcttccagcatggagcacccgtgcttaggaggttaacaaccaggagtacgtgcatggcattggagkggggcatgctatagccggagaaggttgggaagtcctggcttaggagacgttattgaaaaattcccagagccagcagggtgctgatatttcttgccaatgctcagacatcacagggctccaactccagtgccgggatgaggcttgggttggtgaggcactgcctcttcctgcctctacttccacagagaagttacttgctccttcattcttcatcaatcatttgaaaaatcccaagtgcatctccctcctgggtgagaattagatgacataatgtgtaaaatactgcgtgggacacattttggaaaatggtaacatgcataccatcctttctttggaattctaactgtggcatgcgggggccttcagactcatagtgataaccccacaggcttcgtcgttcattcctcagtaaataagcttgagcacctgagaggggcartgagcactttagtactggaataatgcgtggtggggcatcacctggaggttccatcctcacacgtggtgagaaggggctttgagcacagtctccagaacccaactggagtcccaccaggtcacatcccacctccagyrcctgacagctgcatggcattgtgcartttacatctgtgcttccgtttctccgtcttgaggagaggctggagcagtctttccccgatgatgactgagcatgtgtgtgcatgtgaagtccttgtggcagtgactggcgcagctttccctatattctatcataagataaacagtgaagatttcaagtgaygcttgtaaaaatcaccgattgaattattttctttagctattatgattcttaatcaaaaagccgagattgtattgcaatgcccttatacaaataaaagaattaaaatcagaacatctcccaaagtaatgacctaaaagtaataatagccatcctagttgcttatagaaaatctcttgttaattttattaggtcaatcaaaagcagtcctttagttttctaagcttttcaaccagagactaggaatttgaacttagaatcaacttcctctcttgattacattcttaagactcttttacgataatagaacacggcattttccacrgagatcccgaatttgctttgtctacacnaagctatcttatgccgtatctttgtcccctatttccttgcaaacataaagtgtgtgctgggtttcatttacatcacctgtataacaccagccagtctggaaaggtggaatgatactgtatggccctgaaatggcttcggtccattccttttatccagtatttgtagcacactgctgggtggagtctcactgagagctcttaatttaacaagaaaccagtgtgagccaagggaaggggtaggaaggcagggcccgggggaagtgtgagcatggggggtggggtgggtggtgctggaggaggcagggtcattgtaaagggagcattagacttcagccttgaagccraagctctgccaggtgctggaagggaactggccctccagcctgcagctggagaggaccccgcccacaagagacaagcccygcccctgtggagcaagctggagaaccagctagagcaatgatgtgctgggcagaaacgcacaggctctccagggcctggcccctgctgataggtgctggatttaaccccaagacctgtcggaaagaatgctttatgaaatacacttattttttaaagtatattaggataacttgtgataagttcatcacacccactgaaatggctcagaacactttcaggacttcaaaatcagggtggggtatgcctgcttagtcatggatgagtatctggaaagctcagggagctttccagtggcactggggctcccttattcctaggaggcggggcctgagcagggagggggtggggtcccgatgtttgtgcagaggagacacctctgctgcctctgcagagcctgcacctcagcagcacctcaggagcagmcaaggcataaagcagtcaacgcggtgccctcagggcaaatgcaccaagcatggttccagcttattttgaggtgtttggttgttaaaagtttttcagcacttaaaggtctaattttcccacgggtgaaaacatcccattttaagaatgtgtttggagtttgccctctgggtcacggggctgctgggtcagggttgctgcaggaagaagctttgccagggctgtgctgtcctgactcaatgagacaatgacctcaaaacggaaacacctggggggctcggttaaagagccacatgcggcacccctcaggtgtacactattttacctgctcctaagcttactatataatatttgtgaactgctgcagaaagcaaagcacactctgcgaatgcatggcaggtttggggcagtaccttttggttcctttcattgcctggagtgacctttggtcgtatcacatgagagatgcccacttgctaattaatgggtttcttcacaggaaaatgtagttgagatttgtaaaaacaaacggcgttgtcttcactggacactagctgccaccaataatgatttgccattcacaaggacaggagtggccccctcttggcatagagagagtggaaacatccccttccccttggaaaccagacccaaactccagggaccccgaaattcccaccttcaccccatcctccccaggatggcccacatggaagcccacagaccaccagcccacaccagtgctggaggtccacagtcacatgagggtgccctggggagggacaggggcaggaagtaggaccctctacacacccccatgcctacaccagcgcccacactctcagggccagtgatcaccatgacactgtctcaaacagcmcaccttgtgtgcttctccatcctgacctccacgtgccccccagrcctcactgggcctcacaaactgacctttggcctggccgtgacctcctcccagtcaccctgccaccattgcagaccaagtcgccattttagtcatgccaaagattcttggtgaattgcacacggagcacaactccttgcactgaaggtcagcctgctgaggacaggtgtgcgtggaggtcagcctgctgaggacaggtgtgcccggaggtcagcctgctgacaggtgcgcccggagatcagcctgctgaggataggtgtgcccggaggccctacaaccaccacccccaccaccaaaacccaaggctggacctggtgacattccagactttaaggaaatggttgactagaagtcagtggggctttgttcaaaataaagaggttaaaagagagaccatttaggcagaaagttgatgagctggatcttacaacatccacatggagacagcagctgctggcctggtggaagtgtccagcaggacgcgggtgtgtggaactggcatttgggtggcagggagaggctgcaggcgggaatttsaagagttcccccatgtggcacgtgtaagccaaagaccaagtgggctgttgaccaaatctgggtggttctttggaaacaaattgcatatgcaaggctgttccaggaggtttcatccatatcccatatcgcacaagttgcagcttcactcagtgcctcaagaaagcaagccagacaaaagacagacctggtgtctccccagaaaccaccctcctagaataaagtcaaatacctgcttggcaggtattggggatctctaggggcataaattaaatctcacatctttatgagcacaattccttcttttaaaaatcagaaaagtaacaaagtaggtgaagtaaataatccatgtagagtcttattattgctgtgctttattgcaaaaacagactatttgagaaagtaacctatcttttatagagtttgtgcccagatcatattttcacackgaaattttacctgaaaatatatctgaagacttccagtggttccaaaatctcatttactttattttttgacattgctgaatttccttctgcattgtgaaactctagtgctgagcatgctgtatgacatgagctttctctgtcattgtaagtaacatggcttggaaagagaccacagccgtgaactgccaccatcaagcgcaaagcctccctgaagccacctcagcagtgaaagcaccaggcgccatttacctgggttgtctgtgaaaatcacgcgttccttcttgatgcaatatttctagaacaactaagtttgggctttttggtcaaagtcgtgaagctcctgctagcagggcagacagcgaatggtggctgcctctgttttgacaaattcattcccaggctctgattcctgtcacatttcctagtgacattcttggtctctttcggtttttttttttttggactttaacagcatcgccgtacctactatctgtgctgagagaactgttccgcagcaaggctgggccatagcagttgtgaaatgaagtgtcctgatcacccaatggcacgggtgatcaaagccacagcagaccacaggcaagggcttagggctgcaggtggatgatctcctgcgcacgtgggagagtgatcctaggacgtgcagatgcattctgtcaggaaacaggcaaaaggcaggagacatggagagtgggtgcccatcggtgcatctgatctccctggcacccctccactcccctctgcttccttcctgctcaggggcttcatccttcctaggagtgaggaaggccaggcctcatgacagagctgcctgccctgggggcgtcccttctatcgtgtgcagcatcaggagtctgttggatccccagtgcctcatcctgaaatcagggaggcgtggcagggtggaggcagccgtgggcatctagggacacacagcacgggaggccacagagctgagtgagcagagtcccacctgccggaacaagagggcgaaagtgagaattaagccaccgagaatgggtgggctgagatagcgatggggccctggattctcttcctgttcagtatgtgttccaagaagaaggaaaaacatggaacgctgaggaagaccaactgtgcagggaaaagagctggccggattgtgatctaagaggtcaagttgggtaggagaacaccattgtttcttgcaggtcactcactgagcgtaggagcagacagagctgacttcaacttaggggcgacttcagtaagaaagtggggggtctctggggctagtcagggaaatgtgtgccttaatggagccaagtccaaggagtaaaatgttgaagcaaatgaagaggtgctgatgtctgtatcctccggtgagtctgtccatcataaaaagggcagaggctgtgctcattaagactttccagaatcctctgtgaagacagctggaatgatctcacaaggagaaaacacagaccgggggtctcctttgtgctgagtaagtgtttcggccttgagagtggagtgcagcatcctgggtgcggcccaagaaaagcagcttccttttgcattctggtcctggccaaaatgacaaacacagactgcccccatcatctcgggacagagactcaccagggaggtcacccaccctgttcaccacgtcaggsaggtagcgtgtgccgaggcccccacatgtgctgcaaagaccagaatgtacgtagtaaaggtagactcagggccctgatcatctcggggcttacataaaccatgtggcaaatgacaggatggctggccaggagctccctgttgagatgacattgagagagacacaggtaaktggtggccaaggagcatccagtgccagggggcacagccaggcgggtcacttttttcgtttgtgtttgtttgtttgtttgagtgaatggtcagtatcttgtttgccttctcttacatctgtgacccttccgcacgtttctgagagctggcctggccttggggttcagagtgtggcctccaaagccaggaattcctgcactgggatcctggcccttggccacttcctagctgagtgactccaagcaccttattgatctgtgtgtctccattttctcgtctgtaaaatagacctgatgacagcagaccccacctgctggagtgtctcagtatggttcagtgagagtgtttgccccatcttgagaacagggcctggctcagacagccctcgacacagtcgacacagccaccacgatgtcactaatgagcgtatctgtcacttacctgtcttaaagtgcacattaatgaaacccactgggatccggctgcctatgcaaaagtataagtattagtgggatctccaaaaaataaccttgagaggattatctcatatcattacatttttagcaaaaagttcctttttctgcgcttgcttcctccaagaaagtaccatctgtttcaaaacagttcagtaattgctagwactttctttaaaatgtagaggcaagtgctgcttctgttttgtaagcgcccatgaactgtgcctttggtgctgccagagctggaggattttgtatagtattaagtagagtggcttcgctttaattccttatgagtatcaccaaagtatacacgaaaccgatgctggctttgtcatcctgagaggtttcacagttttaagaaagagtttctgagtgccggcatttcctaataccctgcttgacgtctgtggggtggcaagcatttcataaacctctgggggttacaggttgctctctttggacttgttcatggctaagctacacttttttaaagaaccagatttttcttaatgtgtaaagagtgctaaaaaataaggtcaataggagtttttaaggttttgatagtattataaaccaagtaaccatcacacatctcagatgactgtttttcaagagttggcccggagcgtgcttctcgggccatttcacctgtgcacgcttcgttgtggctgcacctgccctaattccccgtttctagatttcctgcttctcctcttgactgtccccagccaaacacacccatcctcccaggaccccacagcctgctcctaagacagcgtctctctctgcaggcctggccccgggtcacttggcatggtggcccaccacctccatcccatctcgccttgcacgccaggtgctcattatccccatgcwggaggtgagggcgggtagtgacatgggtgcagcggctaggtgcagggagggtgacctgctcacgggcctatggctagagagcagagagggggcacgctcccctccccgcacacctctccctgcagaaccacatcatttaggttccctggtgtgagctcccaccactatacccagcagcctcctgcctggatttctgtgcacacctcaaagccagccaacccaaacagaactcagtatcttatcctagaaacctgttcctcctgggtcagaagcctggagtggctcgggcctcccactgatccttcccccagccttgcccacatgaccttagttggactcactgagtggcctctgccaggccctcgccatcttctctggaccatgacaataacctaactggacaacaccccaaaactgaccgccataccacctcccaaatgaccatccacaaggaaaacatggcccaatgtgcgcccacctgcagaatgggtgcaagtgctgaggtacaggtgaaaggcctctctgtcagctttatgcctgccgtgggcagagttatgtcctccccaaaatagttgaagtcctaccccctgtggctgtgaatgtgaccttatttgaaaatagggcctttgcagaagtcattgagttgagaggaggtcttgctgggttagggtggtccctaatccaatgactggtgtcactgtaagaagagggagatttggatacagagacagattcacagagaacaccgtatggcaatggaggcagagattagagcgctgtgccaacaggctgaggcacacaagggtgctggcagcccctgagcgctggaacagagtcctggagcagaccctcccctgggccctcatctccatgtcagacttctggccacctgaactgtgagagagcatatttctgttgtttcaagcccccagttggagtgctgtgttccagcaggcccaagaaactaaggcacctcccatccctgcctcgcccacctccaccccccagcaagctctgactcccggaagcctcaggatgctcactgcccaccctcacgtggcgtctgctcctgctgccccctctcctgctttctggttggatcattgccacttgtcttttgcgttcagctcctgaaccaccttcccctggaagtttcctccactcgtctgggcccccagcccctttaggtaccccctcctgcactcccacagtccactctagagcacggcttctccacagggctattcagccccctagggagtgcttggcaataggcagagacatttttggttgccaccactcgggagagsggtactaatggcattcagagaatggaggccaggaggctgctgaacagcctcagtgcacacggctgggaacgacccagggaggctgctcaacactctgcggtgcacatggtcaggaatgacccagggaagctgctgaacacccttagtgcacaggagcgcccaagctggggatgatccagctccagcgtcagcagggcccaagcagaggcactctcatctagaggacacctgctcctgcagagatgccagatgttttcatcttgtctcccagctccaagtgggaaaactgcacatccgtggttgcgcaccacccaccacgccagcaaggcctccctgctgcgagtccaacacactctgatcagaccaatgctcttgtcagcacccaaagaagaaaagacatgcttactgtattctgtacactctcttccacgtcttgataggctcaaacacgcctttaaaaatgagagccctggccaggtgcggtggctcatgcctgtaatcccagcactttgggaggccgaggcrggtggatcactcaaggtcaggagttcaagactcacctggccaacatggtgaaaccccgtctctactgaaaatacaaaaaaaattaacagggcgtggtggtgcaggcctgtaatcccagctacttgggaggctgaagcaggagaatcacttggacctgggaggcggaggttgcagtgagccaagatcgtgccactgcactccagcctgggtgacagagtgagactytgtctaaaataagaaaaaaaaaaaaatgaggagcccacagatgtgatgcacggcaggtgtgtttggagtgaaggatcgtgttccctgcatgtcagcagggcgcagccagccttcttcctgaggacaccgcatcacctgctgggactctgctcgcctctcctggacacgcacagcccttccgtcccagttccaggcctggaaacattctcgctagagagagaaattttactgtaataagaatgggtttcccagtgcattttttctgcagaaactacatatctctatcaaagtgggagcagggccatggaggagagtcgtcatttccactaaagccacgccaagggctggttcccttgtggctgatccctgtgtggctggtccatgtagccatgtggcccctcgtgccccaccacccaatgcactgtcctctatgccctcagatctggtgggatgttctagtcatctaytttgtgaagccacttctctggtcgcctgtatgtgtttggcttgggcgtgagtcaacaggtctctggggcaaacagtgcattctgaaagtgtaaccgaaagatcaggtttatggcttctgaggtgactattttgagttggtactttccagaaaccattcaacacattttttagctaccagatctgggaactaaatcacagctagtcatgggggatgcatatgaatgagtctgctgttggtgtctgaacgatgaaaggaaccccaagccatattgggcacaaactttgagtgaaacccaacagggagcgcagaagcctgagtggcccatgttggcgtcggaggggcagcgagcagggagggctggtctgcatactccaagtcctggtttcctggaggaagtcgcccagcctgtgtggctgcctccagccctttccctgaggattckgggcccctcckcaggccctggccctgaggctgcctgtctttggtcttgcccctcatggcaccctcaggccacaygcatgctcttctgcrgtgcctctgccttcagtctcgggagtccttgattcgaacccagctcttctatagcccttggcaagtcagttaatggaagcccagtttcctactcgttgcaaaggttgcccaggtcaacatttaatgagatgagatgtgaaaacagccaggcagcagtcgcacatcagagtcgagctgagcacggagcagtcaccgtggcacttgcggacggtgtggggactcagcagtctcccgggttgcacttcagacaaaacctcaacatgacctcactggcggctcatcagctccaacagcatgttcccaccctgtctttctccccctcccctgtttctgctctcccagccctctctgcttgttccctccctgcactggttagtgctgggtcgggttctgacagattcggaacccaccaggctgaagctctccctgtgcaaagggaccacccattaaactggctcatgtggcctggggctccctccactcagccaagagccttccctcaggttactgtgggctctagtcagcagccattccacagcagggaggctcacatcggtccctgcagtttgaatgtaaccaccatagccacctgcatgtgcacacatggacacacatgctcacatgtgacacgatacatgtgtataagtacccacaaacacacaaatgaacacacgtgcacacatacacaaatgcatatgtatgtacatgcattactcgtgcacatgctcacatatgcacacacacacccccaggctcacaataagggctatattcaccttctctggatccttctgtttcctgtctcatccgactagatscagctgaagtcccctgcttgtcagtggcttcagtgtcattgatctgatttgggaatgtgtttcttagaagagtctgatctgttgtagagtctcatttgtcctttagaaacttacaagttgatttttttctaggatttgctttgaacattaaaccttaagagaaaggtgaaatccccaatgtctttccaaagcggacctcctttgaaagatgcttgtaagcattggttttcctcaagccaagagcctagtgagctttaatttttgcccccagatagaagttttaggggaaacctaaaatgagtcttgcacacgtttacaacccatgtcagggagcttaaggttacgagtgcttttagactgacaattactccttcaaagacttgaaaaacaagtagcagctctgtaattttggctcaggaaatgagtgcaggaaactcaaaactttacgtaagcagtctgaaaattttaactatttttagagggcaaaagtctgtaattcataggcaaatgaaacacaaaaataccaagaaagtatgtttgcaaagaaaaggaatgagagaaaaagctaatcaagtaagtatagaattaatgtattaatgtcaacctgttaagacagacataattcaaaaggctaagaaattagctatgtaaatgcaatatactgaatttgcctgtggacatttttgtgactgaatacgtcataaaatctacatgaaaagacagaaatatggtgtattctttcaagagaacagaatgaaactatctttaccaaaggagaagatcttccgtgatagctgaaaaaataagaagccccatttattgtgttcaccctgtgcctggcattgggcaaagcatcttttatgttttaacatattaaattcttatagaatccaatgccacataatactattataatgcttattttacatatgagaaaatcgacattcagagaggttaagtgattcacccaaggtcacacagccaggaagtattggagctgggatttgaagccaggtctactgaattatgcaactccttccccaccaaatacacacacaagcrcacacacacacaagcacacacacacacaaacacacacacacacttaaattccatgcccaagcctccccctcccccaagcatagtgagccatttcacaccttcaatttgggaccccttgtcctctcccaccacagcctggtaaacacctgcccacctatgtctcaaggcttagcttacgttatkgtcaacagaaatctttctgaacacacaaatcactgccaccacccctcttctctctcctttctttctctcttccccagtgtagaatccgtcatactgtctgggttataagttccataaggagcagaattattttccttagaaagctctgaagtcccggtcaccagcacagttcctgacacagggaagacctgcagcaatcgtctgctgaatgaataaagaatgaattgactcttcctgcctctggctcttttagttctacacaccagttgttctcaatcaggagtggttttgctcctgtggggacgtttaacaatgtctggaaacaatttctgtcattactcatggggtgccactagcatctagtgggtaaaggtcaaggatgctgctaacttccttccatgcaggtatagcccctacagcaaagaattacctggcccaagatgccaacaataccaagagtgagagaccctgcctgctccacaccctctgtcccaacagctgcaacatgcctggttatccgcccacagtggactctaagccctaaaggcagagacctggcatcactttgtcttgtttgacccagcacctaacacattgaatgaatgcataaatgaatgaatgagaagcattagacaattaaggragatgcagacgtgccaggctgaaattcaattacatgggggccgaactggggagttaagtttggggccacttgtcatcttattagctgtgttgaaatgttttcatgctgcatcattgctattggccctcaaaaggccataagggaaaaaaagaatcaaatcaaaataccacctactggttttgtttgacagatgcagccctggagaattgtattctcattaacactgttcgacttctgtattacaatgagacttttaaggtggtgatggcaaaatcctgtagttgttcataaatatacacttaaccatgtgtggctcaggaaagagaggaagtgttgctgtaaactctgagtgataacacaaagctgttgtagtggatgagtgaagagtcacatctatgccttttaacattaagaacaagtagagatattttagaagaaatgagagttattcaaaggaaatatctcagactagattctttgattattagttaaatagaaacagacaagggagaaaggtaaatgttatgagaataagaaaaacgctgttaattgtatgaagttcaaagtcctcagtattttcaaatgcattatcttactggatgttcgtcatgatgtgtgacatgggtatcgtctgcacttgattcccagaagttcacatttcaagagactgtatcctggaaggatgaatggcaattcccaaagacctgcagcaagcagggaacacgggatggaggggtcccccctcttcttggtgcagtgggcacagcaagggcatgtcagaaaaacggctctgtgaccctggcagagccaggaaataaagggggaatgcagggagtggcttccaagtccagcatttcactgtgtcrtatttaaacagccagtcagaagatgaacctatgaaaaaaaaactgttaattgtaaacgtgggtgtaagagacaggagatgcgatgagagctccttatcacagtgtagtgcaataaatgcgctgagcctctgactggctcataacgggctctgtctcccagctgtggaattgactaagcactagggctttctgttcataattcttccagggaagaaaaggcaacaaagagtggtctgttcctctggggttttgtttgttgtttcttgtaacaattgagactttcacaaagaataggcaaagtgtgggttcatgccaaaaaccacagaatagtccaggatgactgtgagcctctattggtctagctacctttagttcaggattttcaaataataccatagattttcagtattgtggagaaaaaggatacagatggttaaaatatgcattttcgccaaaaaaaaaaaaaaatcaacccttgatatttgctgtcacttgatgtagaaattgatgctggccgggcacactggctaacgcctataatcctaacactgagaaatcaaggtaggaggattgcttgagcccaggagttcgagaccagcctgggcaacaaaacgataccctgtctctataaaaaaaatttttttaactggctgtatgtggtgatgcatgcctgtagcaccaactacctgggaggctgaggcaggaggatctcttgagcccaggagatcaaggttgcactgagctataattgtaccactgcactccagtctggatggatgacagagtgagactctgtctcaagaaaaaaaaaaagaagaaattgatgctaacatcctcgcaaagatgtgaaagatgtgttttcatatgtttaataagataactttggactttgatctcagcccacaattatgatgattatgaatatattagctctgagtggtctctttttatcaagcataattacatcgcataagcaaatatgcttgaagttataaaactcaaaataggagtcaatcctagtgaggcatggggatgttgctagcagtcaataaatggccatttcctgtcatcttttcctccgatcttccttcatccttttagcaactcttcctatgtgagttatacagcgttttcaaaaaggtgtgcatcgtggcacatgcctgtaatcccagcactttgggaggctgaggtggaaggatcacttgagaccaggagtccaagaccagcctgggcaatatagtgagaccccatctctataaaaaataaaaaattagataaatgtggtggctcacacctgtagtcctaggtactcagaaggctgaggcaggaggattgtttgagcccaggagtttgaggttgctgtgagctacgatcgcgccactgcactccagcctggatgacagagcaagatcctgtctgtaaaaaaaaaaaagaaaaagaaaaattttttaaaaaaggaaaaggttctgctgcccccagtgacagatgcacaagtgaaaccagagggatatccagagcaggcagagtttggtaaccctggactcctgactcctcaactatggattggcctgtgtgtccactgttgaaaagacaattattgaaaaggaagcctaggtaggctccgaatacaagcatatgaaatggcctcttccactccacgtttcaggtggttgggcaccgtctgcccagtagatttagaggccattgcagctgccttcccactggagttgtcagtgagttatcagagagccaggatcaggtggatcgtgcttgctggtggccacacagacccatatggcttctgccctctatggctgtccaaggcacctggctgctgtgtgttgtaggagctgctggtggggaggcctggtccccattcacatcccagtacgtgcccacagttgtgctgtagcaccagtgcccygaattggaagtgcagagggtctgttcagagagaaattctgttcgcgaaggttcctgaacagcaggcgatggttggtaattatgcgcctgccagtacataaagctcagccagttctttccaggcatttctgccccatctgcaaaacatgtacatgggatgcccaaggagaggagcagatcttccaggagagcctgggggaggttaagtggaaggaaatgtgcctcagaggctaagggaacgtttcagttgatccaccattaagaggcttaatgaagagtaattgaggctggaagtgtgagagctgccacaggtccaactgaggccagcatcaccccgactcctggttgtcttccatctgctcctcccctctgatgccagatattccacatttgccagggcttcccaagataytgtcacatgggcagtgttgcctggtttcttcttctgcatagtccagagccgtcttgtgccgtcataagatgggtcagtcccttttgaccactgcagagacaagtgctctgtccttgggagcagaacacgcctggtcactgtgagggagcgtggccctcttcactggccccaccccctcccgggatcgtgtgacaaagcacctgccctgacctctaccctctcttggacctcgaggatgggtctcttcttccatgaaaatgtccaccgtcacctcacaaaatggtgctgaagtgacatgaattccaataaattcactaatggctctggaacttgaattttaaaaaatagagttttaaatattagtagaaatatacaaatatacacatctctctataaatatatttatcttccctgttatcacagaggaatttgaagtgataattaaaggcattcttttgagggagggaaaggaagttcgaacagtatattgcctcagggagagaatgcttggctgtgaattgatgcccttttggtaaggccgtcccctcctgcgtgtctcaggaactggggcagagatttctctgcarcactgtggaatgagcaagttcagattcagccagtgctgtgtgggggtttgtaaagacagcacccccmtcccctaaaaggctgccagccccaggctgccctatctgtttggtgccagagctgaattgttctgcatctgggcagtgaggctgcccccaccctgctggtggccagtgcattgcattgattcagacatcagaaatccccacgactctgtgtgtttttaataaagatggtaggaaacagaattcccagtgacgttctaacctggtttttcttctcatctcacgcagggacggatctgtagaaaagctggcaaatcaaaaaagtccttcagtcgcaaggaagctgaagctacctttaagagtttggtgaagacgcatgaaaaatatggttgggtcaccccgcccgtgtccgacggctgatgtctgccacgtgcagtagacgctcgagcgcctgyccacacacacaccagtaccctgacatctcctcaaygctgtgcatcctccacccgtttttactccagccagaactgcatcctgaatgcccaggagacgtttaagttatttatgaaaagatgtgtgtacagagaggaagagggagcaaatgccgttcggattatgtttcgattataaatgaatgatcacctcgaagtcactttagaacacatgttgagatggtgacatttcccagcctgcctgcccctctgcccaccccggycacattgccctgagcttctttccatgacagcagctccgacgagccggcaggaaactcaatgcccctgctggctccatttccatgtaaatggcgccgttcatatttcacagggacgccgtgcatctccgccgtgcgtccccggcacgtgtttgctgtgctctgtatctctgtttttcttcctggaaggtcaacataacttgaaaatgtgtctttctgtggcccatggtccgctgtgatgacatttagacctcatttgtgctatgacctttggctcatgaaaacacaaatttaacattgccaggttctagtgatttaaaaccacaactgcccacttggtgaaaacgtgctctcgatgctgatttgtggtgtgctgctgtccacagataaaccagtgccattagatggaaggcagaggatactgcgaccacccctgrcagacggtggcgtagacaccaggtgcgccctctggggctcagagcaacggatggtcagctgcgaacagtctcgtccgatgttaggaaatggtcctrcggccgcgcctttgtgttcctgtcttctctccaccaccaaaagcaaaagatgatttcccattcactgcagtcatctgactcattttaatatctgtgctagtgacaatgaatgtcagaactgccaaaggataccaagtgatcatacgatgatttgcatgatcgggtctatttcacccaatagtcacttgtgtgtcccccgaaattgggatgggtgagcacccttgctgtggtgtaaacttcctgttatttaatctcccccacggtttcatttttctcttctgttaatacttagaactttctaagaaactccatgaaatgaggaaatactgtttctaataatatgaggaaagaagtaaaaatgttcattccaagtggcaagtcttattggacacattttaaataaaatcatgcatacctgatacactgcctcaaggatccagtcattgtgggctatccttccatttaaaatatttcagatattcttaaattttttaaatattgcaaatactacaacatgtaattccagagcagcgttctaagtcaggtaccagaaatgagtcttaggaacccatagtctttgcaaaaattcagtagattgaaatagtccccagaagcagccaaggagctgaagggatgattcgatcaagttcagatgttgccaattgtatcttactgctgtgaaggaggaaaagtcttccgggataatgtattcaattcttcaggcagttttgtctacttggggacctgcccattggttcaaggttttcagagatccaagaggccttgcctcaaagaacaaggattggcgcctttcagcagggctgcccattcaccaaacttattgttacttttgtttttctttaccactttcttatttgcccccaagtgcacacaggcagctctgccagaccaaaatgacagtgtattaagaatgcagggcctgctcagcttccctgtgagtcataatagtcgtgaaacttgatgacagtgaacttacgatgttcattcatccaaccctctatggtggcattctccatcctggaaacctgacatttggctgacggtctttggaccctggagctagtggtcatcatggaattacactgtggagatgaaagacctaggacagaaacatcttgctagggaaagcacctgagtttattcctttctaaatattttcctcttctaatgaaaactaaaagcagctttactttagggggaaaaatatatccaaaggcaggtcatttcagtagtgtttattagctgattgaaaaacaggttcacggtgctctctgagaactgcaccaaggggtgcagccaagagactggtctgaccccgggttgggctgggtggcagccggcgacagagcagagagacactcagctcagtgtcgctccttccatacactcagagtttgatttttcttgcatggcatttccattaggtttgttagaaacttatagaagaaatcaattctttagtgaacgaaataccatttttcactcaattggtaagaatttttcattttaaaagcagtaggaagtgatgtaaaactctaccattgcttggactgttaggagtgcggactccctttctggtagactcccttcgtaggcaagcacggtggtgcccagccatggaggcacccttaggacactgagcacaggcctggctgcctgtgccttggccacagcctccttccaccccactgaagtggacacctgcctctggagcccagggtgagaaggagaggcctgaagcctggggccacgttcccacacaagccaaggaacctattcctctttggacagacagcgagggaataatcagacagtgggtgcaaatgttcatgtcccgatagctccacacacccatgtatctgtgggaactcaaaccaagccagagcccacagagccaaacaaacagaaaatcacaaacccatctgtcctcttctcaatgcagaactccttcccgtccaataattttcctgaaccaatcacccttgttattgggtatcttctccactgctgggtaaggcctgcacatggtctgtctgtaactttctagaagactgagaactgcttatgccttagggagttctatgtgagcagcaaggttattccccctagttacacacacacgcacatgtgccaatactcctgcaaagacttgctgtttctaaaatccactactcagaaaaaccagggtgtcggcttaaagttttcagctccatctatcaaaatttgacctttttttaagagaaaaatatgtagatgagtgaaaaagacctaggattgaaagacaaaaagccatgtgtccatgtaaccctggccagtcactccacctgcctgagccttggtttcctcagctgtgagctcctaccaggtcagtgtgggaattggccaaaatgacgcagcagaagtgctttggagactaaagattgtcaacgaaatgtaagtgtcattttcgtagtattaggacgtttacattacagcaggctttaattagaacccacttagatatcgactcagaatgatcaattacagtggttaaaatacacatacctggtaatcatatacttgctttctgtccccagttcttacattaagtcaaccaactgacccaaaaatcaaccaataactaactggccatctctccactcactcagcattctcctcttaaatgcagggcatgcagaagattaaggtacagccccttccctggataggaactcaaaagataggaatagcgcacaggcaccagcaccaagcaaggcaagtgccaaattgcactgcagaaattaaagacatgtgcaagtccagagattttctgactgaaaaccagaaagatttcatggagtaaatcaggtttgagccatggctgggcaaagggaaggagaagggcaggtgtagcaggtgtagaaatgggaggggctgagggcaccttgaaagggagcgtggactctgtcctcactggccctgaacgggagaactggagtccccttgccacctctcacctgcagagtccctattcatggagctgatttcaggaagcaggacacggtcccacctgacagcctagcctggcgtgtggagcttgccctgtgtgtagcaattatatttcagtgtacccatccaatagcatgcgaaattttaatggaatttgctttctaaaggggcagagcttacttcctgactgtagtgagggtagagccactgaatctggaagaccacttagcctaattttacaccctctgcagtgaaggaggcgagcccagagactttgaggggyttgtccacagtaggacaggagccacaaggccactgccttactgtggctttctgatcctttatgttgcttcatgagactattaggcaattcatgtggccctcaccaaacacacactcttcaccccatcattgaatcagtacagttgcaagtcttccaagccagctgagaaacacccacaggatccattctgtgcccaaagcaaattggagcaaagggcagaaattccctccaactgttttgggaagcttctgtaaggggcttggagctcagcctatgggactgtagtcagaactttgtaatttttttctccaaagacagtgaaatcatgtacagctctgttcttagttttctgctaggttctacttatccttctaatttttgcagcctctagttcccatagtattaaatatcatttttaagcccagggcctgtctgatccacagaatgtggtcaataatctggaaaggcaaacaaactctgttgacattcgggaaagcaataagtaatgttagtttggttccagaagaaacacgggagcaaagtgtgctggccaaacagcaacaatcaaagcagaggggagcaagattttctttcaaggtcatgataaggctagacaaatagagtgcaatgagggggtcaggtgcgaggccgtcctcccaggtcagtaaggccgcatggagggataaagagatccctgcactgcccccaaccgccaattcaccctgtgtctctcgcagaattaaagccaggaggtggctttctctttccttctactggtggtaaattaagtgactgtcctactttgtagacatgcaatcgttttgtacctctagaccttgggcagtcactggtgatgacactaattgaactaacacagaaactgctgtcacctgatgtgcttggtttcattcctgcctgccttctctacaacgtgacttcatttcatgaatgtggttgccattatgacagtgctaggatgctgatctgtacaccatgagtgactgcgaactttcagactctcaccgcaattcatggggagactttggtgtatcctgtttccagagttgtcctcttctgtgatcctcaaaagaagagaaaaaaacgcatgtggcataaatcaacaggaaagaaatgtttaccactggaagatggtgagtgcatgagtcaaataatctagaggcactgccctaatgagaaaaaaaaaacaatgattctagaaaataaaactttaaaaccaataaacgtctttacacggaatgcttgctgtgtcctcgcatggtctgtgttcagtaattctcaggatttatctgggtctccacatgtgttctccccacgggccatggtgagtgactttctgtcacttggcaccctctgatcttgtgtcccttgactcattcgtggtttgccaaatgaaaaccttgaagtatatcatgcgtattctccacaaaaatcaatgaaatgtaactgaaccaaatctaattaatctaatcagtgtgatttagatttctccttcagctgccatttgcattataaagatgcttaaacattattgacaaagatttccattaaagtttctcaatataagtgaaatagtgtgcttagcacaaaactgtagcctaaactactactgaactatagagctatttctttggagaacttacagagtaacaattctggaaaatgacaattttcaagtgccctaagcacaatttatcgaagaggtacttcagctcacttttcatactaacatgtatgttggtattcagtttttgttttaagctgtttacccgaggaatttctcagccctagtcaatattcaagatcattttctaatcaagagagtattttttaaaatctcaaaatgtggctattttagtactgaacagggctgggctgttgatcagatcagaaaaccacgcctcttatcacatgtagataaggcactcagccttacacccagacacttggcttgcaccttccaaactgaaattctgcagtgcatgtctactgctgagggctgtagtgacaagacaggaaatgtgtgggaagcaagagcccagggcctgatgtgtaactagaactcagtacattattgtacaaataacagtgagattgatttgacacagtcaagttgaccacttgagttggctgttgggatccactttcaggctgttcatttcatccaggtgaatttgcatcctttcctttgggtgaaagcatgaaagatacaccgtcaatagggcattgactctgaacttgtggggtgatggagatggaagtgtgccaaatcacaaactctccccagagtgcatccagcctcagctgtgtcagagagttataggcagtggtctgggtgatctgtgtccagggacgtatttttcttaaggccaaagtaaaaggcccagcaggattgaacagagccctggcctttcacgttgacaattcaaggtgtgttctgtgtcagtaggataggtgcagggcagagctatataaaattcatgctctccagctcttctttgccacttaggtgtttgtcttaagagaggtcttgatatggtttggctctgtgtccccacctaaatctctcttgaattataataatcccgacatgtcaagggcaggacctggtggagataatggaatcatggaggcagtttcccccatgctgttctcatgataatgagtgagttcttatgagatctgatggttttaaaaggggcttctcccttcatttggcactcattctctctcctgccaccctatgaagagatgccttccaccatgattgtaagtttcctgaggcctccccagacatgtggaactgtgagtcaattaatcctcttttctttataaattacccaatcttgggtatttcctcatagcagcatgagaatggactattgcaggtctatttccatgccagaataaatgttattggaaacaagttatttttatttaaacaaggggaaatgatagagatattaaagtagacatacatacaaaccgcttgacaaaatgaagttgaaatagttcaagtttcgtttgttcaaccttcgagtgtcgggattatgtataactgtacagcagtgagccaggataccagcaacaaggtcaggatacggtgagttttgaaa

SEQ ID NO: 94212 - DNA, 13391 bp, Homo sapiens
ctcccaaggtactgagattacaggcatgagacaccacatcctgcaaagaaacgcttttaattcaactcaattcaataagattttatagagtctatactctgtgcctaaaatgtcccccaccactaaaagataaaccacttctgtgtaatgtaaaaagatagaaagatggatagataaggtacatagatagatatgggtaggtattttaatggggaagatagatgatacgtaggaatagatgataaatataaatagatgacaggtagataaattgatgataaataatagatcatgatgatggataataaatacacatacgtggtagataaatatagatatagaccatagataaatagatattgcctgtgtaataattaaaacagcacatactaaattttcaagatataattactaaattaatgacaaacaaaagcaacaatacataattgtttcaatagaaactctcataagtaaagtttagcagaatattgatcaattgcctacccacatactctgtctctaggcaagtaatataaagggttcttcaaagtgtaattaacgtgaaccaaactgcattgttaaatgttttacttaaaaagaaattattttaccaaatatattatgaattcaataatgataaaagtcataattgtgtttccagtttaattaaagaatacatcaagaatcagagaaacttaacgtgaggggaaacgttggaaataatttattctaacacttatacttagatagcaattatttttaactttggtcccagctgtgacggattcattgttaagagtttacaatgctgagttgagatgcatgaatctgtcaaactcaagttcccttgaaaagaatgtggtagactgatttactccaggcctgtctcgctcatcaacatagaagtgaaattacagatacacatgtgtaaaaaaggattgcataaaatacaatattcatcatgactacttgaagttcatttcaggagcgtacaatctttttcttagtgctggaatattttttaaaatataattcacccttattaatatataaaccatcatctcaatagattcacttatcaatagataccaacaaatccataaaatattacaaattttcatgcacagaactctcagaaaactggaattcaaaggtcctttcttaacgagggacagaccactaagaaaacctatagcaaataatgtttgttatatttaagatcaggaaacataataatgctttttatcagacctctcttctgtattttgctggatagaagaggacagaaataagagttttatgaattgaaaaggaggaaaatgtcattatttatcaaccatatgataatacatagaaaaaaaatccagacaaatatactgataattggtcaaatcaatattagtatttaatagtgttgttggatacaatatcaaatttaaaaatcagtttcctttccttcaatagtaacatcatttagaaaatgtaaattagcatataatttataaaggcaacaaacaaatttacttgacaaaatataattagactcaataaataatgatgtcaattctctcctaattaacctactaattcaatgaaatttaaataaaattgccaaaaggatgtgttgtagaaatcgataagctaattaaaaaatttatatagacagacaattgcctgacatatgccaagaaaatgtttctggaaatgctgaaggtgggagatgtgttccatgagatttcatgccttattactaaatcttagaagagcaaaatattgatgctaggataggtttacctatcaccaaaaacaaagagtgaacccaaacagatatttatggatacataatttattcattcattcatgaatgaagaaaggtaaaccttttggtaaaacatccttgtacaaatgataaactttaaataaataattaaatttaaaaaattacaggtttgcttagagcttgaagccaaatattagaactttaaaacttaggagcattaaaaacatcaaaaatttcaaagtgtttgaaaatatctttataacactggatgattaagtatatcaaaacctgggccaggcgcaatggctcacacctataatcccaacactttgggagactgaggctggcagatcacctgaggccaggagttcgagactaggctggccagcatgtcaaaaccctgtctccactaaaaatgcaaacattagccaggcctggtggcacacgtctgtaatcccagctactcaggaggctgaggcaggagaatcgcttgaacctgggaggtggaggttgcagtgagccgagatcaggccactgaactgcagcctgtgacacagagtgaaactctgtcttaaaaaaaaaaaaaaaaaaaatatatatatatatatatatatatatatatatatatgaaaaactataaccaaaaatgtaaagtttgatttattcaactacattaaagttaaaaatcctgtccatccaatgttaaagtagactgacaggtgaggcatccaattcggagaatatattttcaatatattttaccagcaaatatatcaacaagatacgcacgaacacacatacctatactacagtataaatattgggaatattttaaacaggtggtttagagaaaagttatcatttaggtcttataaaaatatgaaatctttaaagttcattcataaaaaataaacataaatttcattaacaatgaggcatcatttcttacccatatcgttggccgaaacactgagcgacgttgaggcgtggatccatgtgaaccttctctcatatcttggattataaattctcaccatgctttcagaatagtttgctgtcactttacaatgtctattctaaaaatgaacaataaatgaagaatcctacttgaatgcatatgtcatatatactcaggaactccttagaccatgaaacacctataggcatgtttctaacaccttcttttgaaggagctagaaaatataatatgcatcatgaccaattgaagttcatttcaggaatgtacaatagttttcttagtgcttgagtatttttaaaatataattcgcctctgttaatatacaaacaatcatctcaatatattcacttttctatagataccaaaaaaccaataaaatattgcaaattttcctgcacaaaactctcagaaaactgaaattcaaaggagcttagaatcctgaaaaaaactcagaacatacacatgcttatcaaaaagagaatggataatcatttgtgttaaatcaattacacagaaatactacactgcaatgaagatccctaggcttcatgaatatgaatcaatatgggtgaatctctgaaaaatatcatgttcaaggaaagaacccaaggaagacactacaaacagtaagattcttttacataacattcaaaatcaagcaaaacttaagaatgtgttctctaacaatagagtagtgctagaaaacttagcatgaaatcagtatagttgtctcctttcatgagtaaggaaagcattggttgaaaacagaaatcgagtagcattcatttacttttccattccctaactcagggcctccttcacaggtgtatggccccaagcaattgcaaagggtcctggggtcagaagtgccccatgctagggttagaggtctgccactgctgtcttgaaattctgaaagagttaatctttgcatttttgttttgtacctggagtgcaatggacgaagaggcatgcatgcacgtggtcagaggagatatgcatcgtatgcagttctgccactgttctttgctacccaatagcgtacaatgctcatgaagccccttgagcacagaattctgctggactggcaatagggggaattcggtgagattcacagtgtgcacaaagggtggctgttacttctacgacaaagtgagtgctcttgcagcccagagaggccatgctttgtgtccaagttagaacttgcttcaaatatagaaaagtggcaatgacattctaaaaacaatccaagaacaaacaaaaactctatcctatctcctattcttcttgacacatcggccaaccacttatgctgaaaatgatgccatagaagggatgggatgagatgacaacctgtggctccccttcattgcatgacttccttaccatcagtgagctgaaggtacagtgttgctagagtatgtccatatcaagaagtgaaataaaatcagctaagttcattttgtgtagcacacttcccgtgttgtggtaagaatgcagtagatacttacgcatgtgctacaaaataacagcttgtgtaatttcagtgatttctgaatacatgttaactgctcagatattggagttcaaaattggcattgcacaatataaagataaaaatggaaaactatgccagtgactaaatattttaatttttccttacttagaaagacatcaaaaagaaatttattttttaaagacatgacaagttgagaaagagtagaagaaaacgggaaaaacagctttatgttttagtactgttaacagtgctatgaaattggccaactttttctggagagagtcaaatagtaaatattttcagctctgtgagttatataaactctgttgcagtaactcaactctgccattgtagcaaaaaagcaggcacacacaatacataaatgaatgggtatggctgttttccgataaaactttatttataaaaacaagtggtgagccggatttggcccatggaccatagttagtccatggatatgctaaggtaagaagtccactgtaagacttcttagcaattcaaacaacatgaggggaaaatctcctacaaccttaggatttttttttaaacatttctgagtttcaggctaaccgggcatttgcatgatgctgaacagtaattgtaggtatcatatttatggcaatattttcagtgtttgggagtcacagatgaagggattgactcaggtagttccaatatggatcatttagtctgtcttcatgctgctctttgggcaaagcataggaaaaataccagcagtctagtgatatagaatttctgtttctagtagctgtggggttataactttcagagaattgtttctcttaaaaaaagacttgagaaagtcactcatagctatggccagtggcatgaatgtttcatgccctccagcttcagaatctagacactctgtgcttctgtcattttagttctatagaaatactgcagtgtgataggaatactgcatacagagattgagattcaggatagtaaatctctatgcctagtgtagttttgcttttgctaaggggaagagtaaaacatatgggtgtgtaaaactcaccagtgacagcatcaactgttttttttttctttaggaattcagacctcatgaaagggtcaatgaagaaatgatgttttgatttcccaacaggattacccaacatttctctgacagtacctgccagttacttcttccctaaagatttctgctgcccagagaaagtctctagtttagccagaatttctctataatatcgttggtgttgccccatgggttttagctaagcagtatccatcttgtgcaagagaggctcgtcagggcaacttcctgaacaataagctgagatgatcatgggggaaggggattaatgaaggactgttacagaaataaagaaaaaatctgcagtagagcaacaactccaacccttgctggaaagtttcagtcagacactgacatttccaaagtgcccataaatcaacttttaatatactgtggatgcatagaggaggctgtccatatgtttcttttttgaagttttaggcattatttttttcagtgtgaagaagctgtaaccttaataagttcaataaaacagaaatatacataagtactgctaataaaatgactaggccaattttgaaatgtaaacttaaaatgtaaaatcacgggatctgagccttgctcagagtaggagtccatgcggacatcggctaagattccagaatgactaccgtcttgacttacacttttaaaaagtgcacttctgatgcacttctcactgcatcagaatggtccctcagattttccataagacctctgagctattcctccyagttgcgagctgcccagccatccagaccraaacgaggaagacattagccaaacccaatataaggaataytgtggtggtggatggtgttcrcactccatttttgctgtcaggcacttcgtataaagacctgataccacatgatttggctagagcaacacttacgggtttgttgcatcagcccagtgtccccaaggaagtagttgattatatcatctttggcacagtcattcaggaagtgaaaacaagccatgtggctggagaggctgcccttggaactgccttctctgacaagactcctgctcacactgtcaccatggcttgtatctctgccaaccaagccatgaccacaggtgttggtttgattgcttctggccagtgtgatgtgatcatggcaggtggtgtcgagttgatgttccatgtccctattcgtcagtcaaggaaaatgagaaaactgatgcttgatctaagtaaggccaaatttgtgggccagtgactgtcttcaatctctaaatgccaattgaatttcccagcacctgagctccctgaggtttctgagttctccaccagtgagaccacgggccactctgcagaccaattggctgtttctcgactggaacaggatgaatatgcactgcgctgtcccagtctggccaagaaggcacaggatgaaggactcctttctgrtgtcgtacccttcaaagtamcaggaaaagatacagtyaccaaacataatggcatccgtccttcctcactggagcagatggctaaactaaaacctgcattcatcaagccctacggcacagcgacagctgcaaattcttctttcttgactgatggcgcatctgaggcagaggaaaaggctctggcaatgggttataagccgaaggagtgtttgagggattttatgtacgtgtctcacaatctgaaagatcaactattattcagaccaacatatgcgactccaaaaattctagaaaaggcaggattaaccatgagtgatattgatgcttttgaatttcacaaagctttctcaggtaagattttagctaattttaaagccatggattctgattagtttgcacaaaattacatgggtagaaaaagcaaggttacattgcttccttcggagaagtttaataactggggtggatctctgtccctggaacacccatttggagctactggctgcaggttggtcgtggcagctgccaacagattacggaaggaaggaggccagtatgccttagcggctgcctgtgcagctggagggcaggrccatggtatgatagtggaagcttacccaaaataatagatccagaagaaatgaccaggagtttctgtgcaacactaacactaggcaacggcatttcartgcattcctaaatgacatttatagttcctagctcctgttaggaaaacgattcttgtggccttctgttaaatgctttgcacttaagccttgccagtgttctgagcttttcaataatcacagtttactgctctttcagggatttctaagccaccagaatctcacacagacgtgtgtaggtggttgtttttgttctctcttgtcactaaagactaaatgagtgcttgcaattgggaaagaggtcagctgagattcggaaatcatctttgtaatatttgcaaattatacatgttcctatctgtatcctaaagaaaattgttctctataaaatacaaacaaatttccctaaattaacttaattctggaaaaataattcagaatctaaacatcactgaaaacttataaaaaatgtttagatacataaatatcatggtggtcaaccttaataaagtggggaaatattggaaaaaatgtaaaaacacacatatatatgttaaagttatgtacatatataaatttatatgtttatataaaaattagtatatataaagtttaagtatattatgcatatttacatatacttatatacacttttatatagtacataaatgaatatccacctccatatttaaattacatctttaggctgggcatggcaactcatgcctgtaaatctcagcactttgggaggccgaggcggacggattgctggaactcaggagttcgagaccagcctgcgcaacgtggcaaaaccctatcactaccaaaaatacaaaaattttccaggcgtggaagcttgtggtcccagctcctcgagacagaggctgaggtggagaattgcttaagccccagaggtctaggctgcagggcgcccagatcatgccactgcactatagcctagaccacagagcaagaccctgtctcaaataaataaataaaataaaatatcttacatctttatatatgtacctggttttgtttagtaaaattattgtatatatgtatataataatatatacagtatacttatatatcactgcattagtccattttcatactgctataaaaagatacctgagactgggtactttataaaggaaagaggtttaatgactcaaagttccgcgtggctggggaggcctcaagaaacttacaatcatggcagaaggtgaaggggaagcaaggcacgtcttctcacggcagcgggagcgagagagagcaaggaagtgccacagttttaaaccatcagatctcatgataactcactcactatcacgagaacagcaatggggaaatccgcccctaggatccaatcatttctcaccaggcccctccctggacacatgggaattacaattccagatgagatttgggtggggacacagagccaaaccctatcaatcatatataattacatttatttatatataaacttgtatacatgtacacatacatatttatatatacacttgtatatacatacatatacatttatatatttacataaaaacttgtatacatataaattgatatacagatggtctttgacttaggatggtcccatttacaatttccggacttcacggtggtgtgagaacaatatgcatgcagtggaaagtgctgttttcctctcttaccaggctggacagcagcagggagccagctcccgctcatccctgcaatcagaaaggttcacagccaacattctacagtgttctgtgttgccagaggagtttgctccactataggctatgtaagtgctctgagcatgtttcagggaggctgggctaagctatgatgtttggcaggttaggcatattcaatgcattttcaaattacgatattttcaagttgctatgggtttactgggatataaccccatcataagttaaggagcatttgtacctaaacttgtattgatgtgtgtgtgtgtgtatatatatgtatatatatatatatatatatatatatatatggtgtgtgtgtatatatatatatatggtgtgtgtgtatatatatatatatggtgtgtatatatatatatggtacatatatatgctacatatatatggtacatatatatgctacatatatatggtacatatatatgctacatatatatggtacatatatatgctacatatatatggtacatatatatgctacatatatatggtacatatatatgctacatatatatggtacatatatatgctacatatatatggtacatatatatgctacatatatatggtacatatatatgctacatatatatggtacatatatatgctacatatatatggtacatatatatggcacatatatatatggtacatatatatggcacatatatatatggtacatatatatggcacatatatatatggcgtatatatatggcacatatatatacggtacacatatatatggtacacatatatatgtaccatatatatatggcacatatatatggcacatatatatggtacatatgtatggcacatatatatggtacacatatgtatggtacatatatatggtacatatatgtatggttcatatatatggtacatacatatatatggtacatacatatatggttcatatatatggtacatacatatatatggtacacacatatatggttcatatatatggtacatacatatatatggtacacacatatatatggcacatatatatggtacacacatatatatggcacatatatatggtacacacatatatatggcacatatatatggtacacacatatatatggtacatatatatggtacacacatatatatggtacatatatatggtacacacatatatatggtacatatatatggtacacacatatatatggtacatatatatggtacacacatatatatggtacatatatatggtacacacatatatatggtacatatatatggtacacacatatatatggtacatatatatggtacacacatatatatggtacatatatatggtacacacatatatatggtacatatatatggtacacacatatatatggtacacatatatggtacacacatatatatggtacacatatatggtacatacatatatatggtacacatatatggtacatacatatatatggtacacatatatggtacatacatatatatggtacacatatatatggtacatatatataacttggatctgtgcatattttatatgtttgtgaacatttatatacacatttttatatcaatacatacatttatataaacatttaccatatacagttgacccttgaacaacacagaggtaaggaacaactcgccgtcccactcccacatgtatttgaaaatccatgtataactttgactcccccaaaacttaactattaatcgcctacagttgactggaagccttaccgataacgtgaacagtcaattaacacacattttatacattatatgtattatatacggtattcttacaataaagtaagctatagaaaagaaaacgtcattaagaaaatcctaaggaagagaaaatatacttattattcacaatgtggaagtggatcaccctaaaggccttcatccccatcatcttcacgttgagtgggccgaagaagaggagggagaggaggtggtcttgctttctcaatggtggcagaggtgggaaaaaaaccaaatataagtgactcacacagttcaaacccatgttgttcaagagtcaactgtatatgcatatacacacacatacatacacatttatatttaaattatatatttatatatatacctaattgtgtttggtaaaattaattttgttacactcttaaattttttgttatttgcatttcttctctatgtttcaacatttcaagccacaaaaaatagacacaatattctgactgaatgattacaatatgggcatccaggtagttctgtttagacagtttctaaaccaccagctacacagacacatcttatagagctgccatctaaaaaggagatacactagattatttttatgtcattaattgatacacaacacaggcatttgtccccaagggcttcctctgtcataggatgtttactcaatttatgtgaacaaattccaatttgcagtggagtgccctagaagccaaacagaatgcaatgaattttaaatgtcgcttgcttgatgttcttaatttggaaaatatttaaaggatgtgcactgttacagtaatgagtatgtgtgtgtgtatatatatgtgtgtgtgtatacatgtgtgtgtctgtgtgtgtatataaaataaatgtcatatacacctacatataaatgtatatattcatttgctttagtgctttttattacataaagtgattattggtaaagttgaagtttaccaagtgaagtttgttgaatgcaacaaaccaccaccaccttggcagctatagggaggtgattgtcatcaaacaaacctcaacttcaccaaaaaatcattttatttaataaaaagaattaatgtaaatttcatcttttaaaaattctaggttaaggaggcatctttgatctctattttgttcaagggtcatctgtatatgttaaatgtttattaaaatgtttaatattgatgtaaaaaatgtatataaatgtatatgatattttttatttatatatacacacatatatacacacatactgattactataatagtgcacacgtacatattgatataaaatgtatatacaattgtatataaatgtatatgacatttgttttatttatatatacacatatatacaacatgctaatttacagtaacagtgcacatgtatatattgatataaaatgtatatataaacatatgtaaatgcatatgacatttgttttacatatatacacacacacataaacacacacatattaactactgtaacagtgcacaccttttaagtattttcttccaaattaagaatatcaagcacactatatttataattcactctattctatttgccttctagggcactccattgcaaattgaaaccgattcacaaaaacttatgagagagaaagccattgaggacaaattcccaagctgtgtatcaattaattatattctcactatgtcttccaaagtacatttttatattgtcactaaaaatacatgtatcactaaataatacctagtgaatatttttaaaatttacattagaagtacattattgtataatctttttgtaaattattttattatccttttagttatgcataggttgagccaatttgtgtaactgtgatatagctggtatgcacacactaggagttattaacacttaattactccctttctgcttgatcatttccacttttcctcttttacaaacaatatggcaagaaacaaagttatcaatgcttctttgtgtatatatgtgagctgttctttgggagtatttttttagtgctctttataaatattaaacttatttgccttcaacaaaactctaattgccctaattcataaaatgaaaatctaaagcctagttactaaattgctcaaatcacacagctagcaggaaaaaaagctgagatcaaacccagcctgtctgtccccaaaaccctagtaattaaacgtgtcctgccttctcaaaggtattgttgagtaacatatgcgattggaggctttccatttcattagacaataccaaaaggcttttccaaattgggtacagattcccttttgctacaattccccaacaatgaatacagcagacatttgaatttttgctaagctaatggctgtgaaattccatttctttgttttaatttttcatggctttgatttctggtggaatggaatttaatggcctatgtttattgatctttcagattttccccattaaggggaattaggctt

SEQ ID NO: 94213 - DNA, 160757 bp, Homo sapiens
  misc_feature (1)...(160757): n = A,T,C or G
cactaagtggatacactctaggatttaggcatgttaactttatttctgttgtgttttgaatcgctccagagttgcatgtagatagcatttatttctgtgcacttaaacctatttagaaaatatctatgaagtaaaaatggagaggaaatagaaatgtattttttcatgaaaattttgatggaaatttcatcaagtttaatgattcaccaatttcttacattaatttgaattaagcatttaattcaaagagaggggagcattcattattgatatatttgggcttttaaaaactccatcctttataaatagtcaaagtttgggccacacaaattatattttcatcatggaaaaatttcaacttctcaagccataatgttgaacagaattggagtattttctttagaatttcttgaacaggcaaatgaaagcttattatagcatgcacgtattttcttttctttttggaacatcaacaccagtatattgttggcagctattgtatcaaaaaaataaagtatactttcactatcataaaggattctttccccccctcatgaaaataaacaacaacttggggtaaaaaaaaaaaagatgatcaatgttgagacaactgtcaagtttctttcatacatgggctgcaagttttcaagactttggtgcagttactaatatgaaatagtctttgagttgataacacttctaactagcttatcctcgatgttctccttctaatgtcagtggtattgattggtgactaagccccatgtaccatgactaagaccaggtagctggtcccctttgagtgggcagatacatggtagttttgctttagattcctttatgtccccagaactcagggatgatccaaggctggggctactcttgctgtccttacatccaagtctttggctgggaataggtcagtttcagagacattcccacagagcaggagggacagactacttctaagcaggttgttaggcactggtgtctaaaatttggtcaaattttagacaccatgagcaatagcacattatcaactgtgatcatttaattatctcttgttctccctagctacattttctgcctgttgtcataaagattaagtgggaccacctacttagatttttagttatcgtatttttatattaaaaatagtaactcattgtggactttgctcattccattcaatcacaaagccttctctagggaacatattatcaaaggtccctcctcttctattttagtttggccattagcccagaaagtatttccacagaactttaaaatttgtacccctgaaaatattaaataacatcaatttatccaggaaaatttgtctatggtttaagataagtgtcctagtaaacaatgagtatacttatcagatatttctggggcagggggagtggggagagagagcaatgagaaatttcatgaggaaatgtaatataataaggttttgccctaataaagcagaaccaggaagttaaaaaaaattacagtttgaaaactaaaggacaggtgttagaaaagagaaacccaaacaaaggaagaagaaagacctggactatatggattttaatttaaggagttgcactgtgataataaacctattcttttaactcaaaactgtttatttcctatcccattaactaagtggaagatctcaaaaggggacagtcctgtaggccaaatctaccctgggagccaaggtgcaccctctgggtagctcgagagagcacaaggcatcagttggtggtgagcttgacttgagagttgagactaaaacagctggtgggagagtaatgtatagcctaaaccatatgaaattgtatgtggctggattttcttttcttcattttttttattgtaaaatacagataacttagaatttaccattttaagagtactattcagtggtattaagtacatttgcaatgttgtgcaaccatcaccactttgcatttccagaacgtttttcatcatctcaaacagaaattctgaacccataaaacaactccctattaccctccccctagcccctggtagcctctattctactttctgtctctatgagtttgactactttaggtacctcatataagtggaaccataccatatgtggcctttgtgtctggcttctttcacttagcataatgttttcaaggttcatccatgttgtagcatgtatcagagtttcattcctttctaaggctgaataatatttcattgtgtgtatacaccaaattttgtttatccattcatttgttgatggacatttgggttgtttccacattttggctattgtgaataatgctgctatgaacggtggtgttcaagtgtctgttacagtccctgttttcccttctttggggtatatacctaggagtggaattgctgggtcatatggtaattttatgctttttgagaaactgccatgttgttttccacagcagctgcaccattttacattcatgccagcaatgtaggagggttccaatttctccacatcctggccggacactgtattattattatttttttggttaatagcctttctaatgggtgtgaagtggtatctcattgtggttttgatttgcatttctctaatgactatgatgttaagtgtcttttcatgtgcttattggatatttacatatattctttgaagaaatggctctgcaagtcctttgcccatttttgacttgggttttttgttttgctgagttgagttgtaggagttttttatatgttctggatattaatgccatatcaaatatattatttgcaaatattttctcccattctgtaggttgccttttcactctgttgatagtgtcttttgatgcacaaaagtttttaattttgttgaactccaatttgtctattttttccacctgtgctattgtcatatccaagaaattattgccaaatccaatgttgtgaaacttccctgtcacgttttcttctaagagttttatagttttacctcttatggttaggtttttgattcattttcagttaatttttgtatgttatgtgaggaaaagatccaactccatttttttgcatatatatatatatatatatccagttttcccagcaccatttattgcaaagactatcctttccctcattgaatggtcatggcaccctcgtggaaaatcagttgatcatatatgttaagggttatttatgagctccttattctatcccattggcatatatacctgtccttacgcagtacagtttcatagtgagttttgaaatcaggaagtaggagccctcccaacattgttctcctttttcaagattgttttggctagtggcgaggtgggggggaaactccttatctgtatgaattttagcatcatcttgtccatttctgcaaaaaaaaaaaaagcctgctgggattttgatagggattgcattgactctgtagatcaatttgaggagtattgctatcttaatacttttatttcagtcttgaatgtttttcaatgatgttctgtagttttcaatgtacaaatcttgcatttcttttgttaaatcgatttttaactttattgattttgatgctattgtaaatggaattttaacttaattttcagattgtttattgctagtgtgtaaaactataactgatgtttaaatattgatcttatatcctgcagttttgctgaacttgcttattggctttattttttttataatggatttcccaagattttctatatataaaatcatgtcatgtgaaagtagcgatagtttaattgttcctttcttatctggatgcctttcatttctttttcaggctagaactgcaagtacaatattgaacagaattggtgagaggggacatccttgttaaaggtgcacttttgatagggttaaaagaccagtgttcaacactttccaatcctgacttygggcaaatcatttaccctttctgtttccttatctaaaatagaaaataacagcctatagtgtacgcgggtggtcgtgtctgctttttagaagcccatgagctagtggggaagcaaatgattcatggaaataattataaaaacaaggtaacatatgctaagagttattagggctatgaatgatacatcttggataccctattagataatttgtggtgaaaaatttgtaaacaatcttgtgctaaatagagaaatggtttaaaaatttaagataccaataacttgctttcactgtcacctacattagtttggttccatttttaacagtcttttattacaaactgatataatcatagcataactaaattcaaccctcttctctataaaatagatctcggtttgtagggttttactatgattttgcatgccatttgatgtccacaggtattttttaagtcaaaaggaaatctgtaaattaggaactgttaatttcctcttcatttgggcatcctaggtagactgtacagatttgttccaagcaccccattaatttgagattagcctaagtttttcctatgcccgcactttggaatataaacatgtagaaaatagtccatgacacagcggatgggttcataagtttcttccgggtcctaacaccgaattgtgctgatgatctggcaatggaggctaatcttgccacatcaagtacggcctattcgctaagccgtctggggcactttataatttttttctttgctggtctgtttgaagggctcctatggccaaaaaggtggtcagtcccgtcagctaggctgtgaggacgcctaaacgctttgaggacgcctaaacgctttgaggtagtgatgatgcatgatcgtgtgaaagagtttctcagagcacctccctcgcggggtggggaaaaggacctcactccccacgccccctccttccgctgcgggagatagccacaccttccccctatcggcgccaagcaggtggccaggccctcgggacctcgcgcccccgcagccagtggcccggccagctcgtgcgtcacgtgacgcgggtcagctgcaccgccgggacctccaggcaccgcggcggcgaccgcccagcgcgtggtctcgagatctcatctttccgcgcccctccccccacggtcccggaaaagggggaggccggtgacgtcatcatccgggttcttgtcggcggggctacggttcacaatggaacaaaaacaagcggcccgagtcaaactatgagcgacgcggctgcggctcacgcgattaaccctgtcgtggccacacaccccgccagtccctgccgcccagcccctcccgagtggtgtgccagatcttttcgggcctcccttccccaacttcggtcctagagccacctctgccctcgtcccgctcctgagccgaggggcatggaacaggatttctggccgtagcacgaccctgaaggggccagccggaagaaacagtactgcgcgaacaatctttaccgcattgtcttcccctcccccaccctagctctccgggttcccggcggctcgcgccgaagcccggccccctcagcggctcgcgctgctctcccagccttgacggcccggggtggagggagagaagagggggcagctgagcgggagggggctgggcaggagcagggggagggccgaaaggaggggcctgaaaggggcgggccctgacgggggcggagaacttcgggtcttgggcggctctggggctagtgggagtctgcgccgccgccgccgccgccaccgctgctgccgccgtcgccgctaccgccgccgccactggccgagcggtttttttttttttggtttgccggatccgccatattgacgaggacgggcatccgcggctgcggacgctagtctccgccgccgccggagccgcaacctctccgcacccggccccgtcagggcctctgtcgcgcctagcccctccccgccttacacagctcccgggcctcgcgggagcccgccgccgccgcctctctctcacgggaggcggccgccttagcgcccggtgcttgggtcggcgccgggagcgaggagcgagctacttcaaagccaccaggcctggagcggggacagaggcggcgactaggggaaggtgaagccgtcgctgcaggaggaggagcaggaggaggtgacgcaggagaaacgcaccgcccggagcccgtctgagctcagcgagagccccagcctgaggggagaaggggaagagggccgtcgccggccaaggaggaggaggaggcgggcgcggcgaggagcgagttccggcsccggtgtgcagccttttggttgagacgcccgcagccccgagcccggccgccgcagcctttcgatacactttgttgccggtcacccccgggcctgggatgcacccagggtaggtctcgtcccgggaccgagccccaccgtcgcctggtgcctcccgcctccgtgtgccctggttgtgagaagacgtctgtgtcgtgcggtgagtggccagctgcactggggcgacgctctttcccggggccaacagctggatgtgggtgaggggaggagggcgaggggggtgtgcgtgtgtgcgagcctcttccctcggcggctgccggccaggctggggcttccccgttccccctcctccggcccgggctgggcgggcgcgcgggcccgtgttgtgtgtggagccggtgtcccgagagcgtgtctgtgtgttttggactgtaagggaaaatggctgacggctccgtccctccccctcctcccccttcccgtcctgtctggggccgagtaggaggatggagtctccgggcgtggcgggcagcccccccgccgtccgcacccgggggccgggtcggtttgggggctggccgccccccgcccggcggccgctttcctacccggtctggttccacttgacaccaaacgccattactgaggtggagtgatttggagctggggagctaggcctcggctacgcctggctatcaggcctgacgacttgtccgcctccccccaccctcccgcgataacccgcagtttctccccggccctgggctcctggagtgggagctgggttatcggcctcctacacctccttcgccccgctttatttgcagagggccaaagccgtgaaaggggtttttgaatgcagaaatcgcttccaagctagcttggacctattacctttctatttttaactgtttctgcaaatattagcatgtgcgagtttggtagtgatcaggtcttcagattcttgtgacgtgaggcttagggttggataaatggctgatttttcattcattgtgaaataagttaaagagttatacagcaggtgtgtagatggcttcttaaattatttgtgtggatttctgtagcgactagaacttacacgagaatttgcaaaatttctmgtagaacctgcttaaattaagcatgttattttttggaagttccatagttayaacgttaattgaatttacacggtgcagtttacaggtgtatataattgcttcagattgtcttttagtttaaataagcaagttgtaggtatagattaaatattcatgctttatttttcggggagagaagtatgtgtactgttcttttacctggaaacccatgagtccctaaatctacttaacgtttgtatactttcacttttgaggaagaatgatttggggtgcattgattaggaaactttccagcaggtacttaaccctctcggagctgattacccttaggtaaggactccttaaccatgactagcttggctggttagtacacttgaactcaaaaatagagactataaactctcctttagatctcgctcgtcttctaattcgctgggctgccattttggtttcagcaaatrccttcaaattcttgaagaattatgtattaaatataaaaaagtgtcaacattcgttttctcaatttttaaactcatgtgctgtgtcatacatctaactttaaccctttaaactttatcgttccagcttttgggtggagtgaaagcttgaagtatttggaattggtgttccacaggtgaactcaaaatgtctttggtattttactgttttattttctctaatttaaaaataggacgtttggactatatgaattctctctaccccttttcttgtatttttttgcatgaacatgtaacttgtaattctggttatcagcgttctcatgtttcttttgtttgctgaccttggtagtttctgagaatttctggagggagtaatagcaccagcaacagtacatgtgagaatcttaagttacttcaggaaggaacattgaagggcagattttacctttcaccaggttattggggtctctagtttggtgttccatagtccatagttctcatggttttgtttgtttgtttttttgtctgtcgcccaggctggagtgcagtggcacgatctcggctcactgcaacgtccacctcccgggttcaagggattctcctgcctcagcctccctggtagctgggactacaggcgcgtgccatcacgcccggctaattttttgtatttttagtagagacggggtttcaccgtgttagccaggatggcctcgatctcctgacctcgtgatccgcccgtgtcgacctcccagttctcatgttttatctatggaatgctcaagtaggatttactttagatcttttttcttccagagtcttgtttttaatatcttaaggtatgagatttcttygctatcttctcagagatttttctttgacatggtggtaataatgcagcttatggttttgaaatggatgtttgtcatgaatttgctaatcatccagttcttgattagttggtcacacaacaagtgtctttgagcttatttttatttaataagatcaatttctaacgttttagtttcaaaattttagtattaaaaccaatctttgtttaaaacagatgttaagaattagttatttgaaatatctagcagtgtgtgttaatggattagtgttcttctaagtcttttgggcagtgaaggtgaggggggtcttatcctgagattgagttagttgatttttattctgaaagaacgtattactttttatggtagcctacattatgtttcccctcttgtaggtatgttttctgagtcttgaattgtttttcttttttttttcaaaaagggaaaaaaccggattttagttgtcatttggttcttttaggagctgtgtttttgaaagccatcctgtgtattgctaagttcttgtattattttaacatagagtttaacgttaatatttgggaaagagttagtgcattggacctcaaccctgactggacatgagaatcacttggcggggttaaaaaacaaccacaacaaaaaaactgatccctgggttccacccccagagactgattaattggtctgatagggagcctgggcaaaggtatattttaaaagcattgtggatgattcttacatgcatttggagttgaaaaccactgggctattgtttttatcatgttgttagaactttcaagtggataaataagaaaatggatttttttctcaattgttttcagttattagcatgattatcatttgagcattaattgtctgtcagcactgttaagcattttccatttattgccttacgatgggtctgaggtctgtcaggttcaaccagtggtgcttcgactactgtgctatgttagtgaaatgacactgattgctatttttaaaaaagcatttagagcttttggtttgtttctcgtaccagagtaagttaagatatagtttagtttttaagactatcaagatagtctccaatttgataaatatcttggttgcccaagggagatgttaaaagctatgtggcaaataggtttctccccttccatatatcttccagcgtgctcagggtgatagtttagttggtgcgtttatgacaaaatattacacaacattcctaaaaggtgtagaaactatgcatttgtctcctagtaatttatttaaatgatcccacaaattaccgtttagtgtcacatgaaattctgttatctcagtttgagaatttagagttttatttgtcttagtcaaaatcagtttgattttgattaagcgttttgaattttgtgttgttttgggattgatgtataattgttttatggaacgaatgaaataacaataacagacatttatttggagtttctgtctcttaatccccttggtccattggaccaaattctgcatggtgggggcatggcagcagggaagcctataggagtttaggatctatgagggtttttttttttttttttttttttttttgagacagattctcactctgtcactgaggctggagtggtcacggttcactgcagcctccacctctcctgggctcaggtgatcctctccccttagtctcctgagtagccgggactacaggtgctcccatgcctggctatttgtattttttttctcttttatagagatgggttttgccttgttgcctaagctggtcttgaactgctgggctcaagctgtctgcctacctgggcctcccgaagtgttaggattcccggcatgagcgactgggcccggccctatgagcattcttagtgtgacacaagattccccaaagatctttttgttaaattatagaaaatgagactataaggatcatgaaaaaagttgatgtaataaggaaaaagacttaaaacttctaacacttacctatattgggcattgaatttataatttattgtggattataaagtgatgaccattgtaatatacttttaaagaataacttgtgaaaaagtatattgttaggatgagatcgcttacctaaaatttattcttcaaagatactcatgctaaatcttggtgtcttcaacgtgtgtatacacacatatcttatatttggcagcaaatggattttcaattttattctcaatcactgcctaacaaggattttctaccacctctgtgtatcaatcatctgtggagctttttcaaaatatatatttgctctataggtgagtctgatgtgtaaccagaggtttttttttgcagtcccttttagggaaaggggagaattgagaccctttgcatgtcatgtgttccaccattaggcagcagtactcttgtttgagtttcgttttgttagtcacacagtcaaaaattccagactgaaacacaaacatgtagtgaaaagctcaaacactagaagagacagggattccacactcacatgtattatatacagtatatgtgcacatatatatcaaatttattgtcacttagcaccttctcggtgttacggttccagctctactataaacattaatatctgttaagacatttgtttcctttttaatccgttcaacaaatacttctggggcatctgctgtgtgctaggcactgttctagagattactgttgtctagaagctaacatatgaagtgaggtgggctggactagctgatctctaaagtctttagtgctagttttctggcattcttttatgtacctcgtaggagagattggattaagttgttatttaaaaaaactttgttatggtatatgccaattgaattttttttgtcactaaatagaatttcattctgaactccagttttctccagtgagcccaaatgtcaagtatagtagaaataggttcttttggaattcttggcatactggctttaggaatagctgtacttctgatgctgttaatttttgaccagaaattacatactctggtgtcaccccttactcctgccattcctttgctgtattgatgctctattatctctatacagtgtgtttttctatttaatttactttgtttaggtgttttgattaattttgtcctcacaattctatctttaaggttagtggctttcattctaagtcagtgataatatccttagcacctagaaagtgcctggcatatagacatttagtaactgttggatgaatatagtttatcacattcttgctattttacttattttttgctaaatctttttacttctgggagtcacttttcttactaatctcattacaatgagaaatcctggaagagatctcaattctttctagtcagacccttcatttttcagatgaaaaaaatggctcaaagaggtgaaaggtgaagtaacttgaccaagatagcatgccatagactaccttctttatgaagctatatctatatgtgtcaaatcacattaattattaaattctctgtagtcactcataaaattaacattaaactgtctccctggtaatggataataaggtcagggattctgtcctttacctttgtatattacagagcacctagaataatactgtttataataaccatttgattacctgaatgggaaaatctggggcagtatttaacttgcagtacctccaacctcttgtacagaattgattcatcttcattttatggcaccctacagtttattcttattaatcatgtgagctttgaacaccatgttagtcaaccataatcaaaggaattgttttccttgggatgagtttgagctggtgatcgtgcatattagatcccatcttctacagagcctgtgaattgggtggaaaggaaaaagggagtggcgaagcctcctgttagtatccttgatgtccattttattcctgctgactttggtggctattgagagttataagttgaggctgttggttacatctctcatttctagtcttttctgttaactggttacttagaactcctaagtaaggccgctcattattaacttggaccccagagagcatggaagttaccgtatagtattgaacccatttctgcctaacagtgttttctctctggtcgaggtgtagtgtacaaagttttggttgctctgcttggtaacatctctggagttcagagcacagggatcagtaaactttttctgtaaagggccacatagtaaatactttggactttgtgggctaagaggcaaaattgaggacattgggtaaaatttttattggtgaaataaaaaatataattaaatacagttatgtataacttaggtctaatgagaaaaacaatttggtgtgtgtgtgtggaggggaggtaatacagtattttgctttattgggtaaagttcagtgttccctgtcatcaaattgattgcagacgttctgtgtgaaatccattcttaccttgtgagctgtacaaaaacaggaggctggaattggtctgttaccatagtttgccagcccctagttaagagcagtgatttttttttttaagaggaggggtctcgctgtcactcaggctggattgtggtgacgcaatcatagctcattgtagcctggaattcctgggttcaaggcatcctcgcacctcagcctgccgagtaagtaggaccacaggccgacatcacctcacctggttaatttttgttagagaacaggggtttgactgtgtttcccaggctggtctcaaactcctggcctcaagcaatcctcctgttttggcctcccagtgttgctgggattataggcctgagccactgtgcttgacctcctatttgatacactatatgttaacaactctgaacctcctttccttaagtcaggttcaaacttctgtacattagctgatgaaagggatttctttttattgcaaggtggtattgcctgagaatagtttggtttcagcagctttgctgtatttgtacggcagtatcttgtgtttatgtgcaagttcagatgtattttgcctttttataagaatgagcagaaaacaaaaaagtaaatggcgcgatctcggctcaccacaacctccgcctcctgggttcaagtgattctcctgcctcggcctcctgagtagctgggattacaggcatgcgccaccacacccagctaattttgtatttttaatagagttggggtttctccatgttggtcaggctgtcttgaactcccgacctcaggtgatccgcctgcctcggcttcccaaagtgctgggattacaggcatgagccatcatgcctggcctacctggaggtcttaaatatccttgagacagagggaactggttagggatatgaatcttaaaccttactggattaggttgtgctcattggttaggttagttggctttgtgcaaatagtgaatgcaataattagaatgaaataggaattaagtgaggcaaatgtatgatgaagtttacatttgaaaggtgagggtataattagaaataaaagtttctgtactctgtgagtgggaaaaacccctaaaaaggtgactgtcgtttttgaaatttttgacttctctcacattttcgggaatgtgaaaggaggatactggctatgtacagcatttgtccagacttttgaaaatatagaaaatctcatttactcatttaattagtgtgtatattatctgtttactgtgtcctttgtagatataattaattatccaggattcttaagagttgacttggagcatgctgagctgaggcaagagggattgtggggccagactgagtgttggaggaggaacctactgtagtgactacaggtgtatttcttttttctttttttttttttttgaaatggagtttcactcttgttgcccaggctacagtacaatggcgtgatctcggctcactgcaacctccgcctcctgggttcaagtgattctccagcctcaacctcctgagtagctgggattacaggtgggtgccactatacccggctaattttgtatttttagtagagatggggtttcaccatgttggccaggctggtctcgaactcctgacctcaggtgatccacctgcctcatcctcccagagtgctgggattacaggtgtgagccaccgtgcctggtgtgtttcttgtctgatgtcagtgcatgtcgttatctgagccatatcaatgtcagctgaggattgctttgttatcctcggtgcattatgggaaggagaatcatgtcagtgctaccttactgtgattgaattgaattcattgatttaatatagattcagttagtacgccttatccataatatttgggatcagaagtgtttccgattttgtaattttttccccatattttggaatatttggaatattacttgcgggtgagtgaaaattcaaaatccgaaatttggggccaggcgcggtggctcacccctgtaatcccagcactttgggaggctgaggcgggcagatcacttgaggtcaggagttygagaccagcctggccaacatggtgagacccccgtctctactaaaaatatgaaaattagccaggcatggtggtgtgcacctgtaatcccagctactcaggaggctgaggctggagaatcccttgaacccaggaggtggaggttgcagtgagcccagatcgcggtactgcactscgtctagcctgggtgacagagcgagactccgtctcaaaaaaaaaaaaaaaagttcagattttggagcattttggattccagatttttcagataagggatgctcaacctgtgccattttaggcaccagagggtatataaagatgattctctgctttcaaggctctgaagtatggtgaaccagacagttatacagtgcaattacagctgtattaagtggaggtgtgaaaagtgtagtaggagagatggagaaatcattgtttggcattgggtgaggtcttcaaagatgtcctattttcatggccctattaattagagcagggacttccggtcagagggatcaacttgagatcaggcagggttttttaaccctattgacagtttggggcagataagtctttgttgtgaggtgctgtcctactcagccctggcttctacccacaagatgccagtggtatagcccctaccccactcatatgtcttcagacattgccagttgtgccctgggggcaaaattgagaaccattatttgaaatggagcaatgcaagtgtgaaagtatagtgttttcagagtaagaactagtaggagagtgtgcaaggaacactagagatactgggaggggaggggttatgggagatggaactgaaaggtagtttgagtgaagctaaaatcacaaggggtaaccttgagtgccatgttaggacatttgccttttactgttaaggtaatgagagatgtactttgaagtttaagtgaaaggagacattagatttstgtttgtttttgaaagataattctgatggcattcgtggcagatgtgttggagagttgagtgtcgggggattgagatggtattttaaccgttcttctgaaagataagaaataatgattagggaatggaataaaggaaggagatcaatggggtgctcccatggtatgagggaggtgctgctaatttgagtttggcttttctgccacagaatggagtactgagctaaaaagcaaaacacctctattgtcttcctttcaacttttcctgccacctccaattccctttcctcactgagagctgctgtctgttgaggtctgttgaaaggtcattgagagaagggaatctgggttacagaatgactactctctcaatgtggttccttaaacagtggattatcaaagcacaagtgtcatcttcccccccgctccccgcaaggggttagactggcatccagagagcattaattgtagcctctccttggtttgtgtagatgttattttgccctaaaatactttgatatacaaacataggtgaataatctgatggtttaattgtaattatttcattgcttcctattttggaggttagctttactattttaagtgagaatgtagtcagtggaagggtactggacttggagtcacaagatctgtgttttatttttttattttattgattttttgagacagagtctcgctctgccgcccaggctggagtgtagtggtgtgatctcagctcagtgcaacgtctgcctcctgggtttaagtgattctgctgcctctgcctctcaagtagcttaggattacaggcaccaccacccacggcgaatttttgtattttttgtagagatgggattttactatgttggccaggctggtctcaaactcctgacctcagctgatcagcctgccttggtcccccaaagtggtggaattacaggcatgagccaccgcgcctggtcaagagctgtgctttagttccagttacccaactccctgtgttaaatcacttagctaacctcttgggtcttcatgactctgtaaaaccaagatgttgggcaagaggtgagttaaactactacttttttaagttcttaaattttatctttattcctaaagatgtggaaaaatctgtagtcaagagaaattgtcaagtaaaggaaaacagagaaggtaaacactttaatgggtttagaagttggttatattcctccatttacttgtcaatccaacaacttgaatgtctcctctcccttgtttctcctgtgtggtctgaagggctttattttatttagaatcctgtgggttaattgtgcttggcccacagcttgtactgtgaatttagggaccatagactttgtagccaggggtataatttctttgttggcagagcaacttaaagtttggttaagttttcatctgcagtctagtgctttaataacataacttgctaaaaagtgatatagcctgctaggggaaatagtatttagggggaaattattttttccgaattgaagatgaaaatacacagataaatacagtaatagtgatttttatctggcacagatggtttcagagaaaatgttgatacctcatttcttattttactgtaagagaactagcaaaagaagcttattttgtttcttaggtgagtcattctcaaacttggtctcaggatgcttttatactcttaaattattgaggatcccagagagcttttgtttatgtggggttacagccattgatgatttactgtattagaaatgaaaacagacatttaataaagttatgtatgcttttaaaagtaacaaaaccccactgcatgtcaattagatatttttatgaaaaataacttttccagaacaaaaattagaagagaggcattgttttacatgttttacaaatctcctatctggcttaatagaagacaactggattctctgcctccttctgccttcaatctattgcgatataatacgtcatatagcctttggaagaactccatagtacacttgagaaagaatgacagtgaaaatggcaagtaaagtcttaagaaaacaattttgacctctctgacctcttgaaaagatctcagggatctttgagaaccagtgtcttagactgccaagagaagatgtgatgttatcttttgagtggcttatctactgtaaattttattttaactgagatatataacttacagtaaaatgcacaaatatgagattgtatagcttgataaatttttagaaaatatatacatctgtgtagtcattcagatcaagatacagaatatttccagcaccctggaaggttcccttatgcctctacctcctccctgtaaaaccccaaataccctgacctcttttttttttttttttcttgagatggagtctcgctctgttgcccaggctggagtgcagtggtgtgatcttggctcactgcagcctccatctcctgggttcaagcgattctcctgcctcagcctcccgagtagctggaattacaggcacacaccaccacacctggctaattttgtatttttagtagagatggagtttggccatgttggccaggctggtctcgaactgctgacctcaagtgatctgtccacctcggcctcccaaagtgcagggattacaggcgtgagccaccgtgcccagcctgacctctgtcttttaatgaatgttatgcctatttttgaacttcggataaatggagtaatacactatatactcctgtatctggctgctgttgctcaatacatgatcactaactgtctttttctttattgtttttttgagatggagtcttgctctgttgcccaggctggagtgcagtggcgagcttggctaactgcaacgtccgcctcccaggttcaagtgattctcttgtttcagcctcccgagtagctgggattacaggcgcctgccaccacacccggctaatttttgtgtttttagtagagatggggtttcgccacattggccaggctggtctcgaactgctgactgcctgcctcagcctcccaaagtgctgggattacaggtgtgagccaccgtgcccagccaacttcgtctttttcattactgtatagtattgtattaaatccatgatttatttatccattctgttggattgaggtgggtttttttcatttgtttgttttgaaacagggtcttgctctatcactcaggctggagtgcagtggtgtgatcacagctcagtgcagccttgtccttccaggctctagcgattcctcccacctctgcctcttgagtagctgggaccacgaccacatgccataatgcccagataattgttttttttttttttttttttttttttaaacagagatggagtctcactatgttgctcaggctggtctcgagctcctgggctccagcaatcctcctgcctcagcctcccagagtgctgggattacaggtgtgagccactgtgtctggctgacgtttgagattgttcagtgttttcaccaatataaagaatgttgccatgaacacttttgtatatgtcttttggtggtcttttgctgcatatccaggattggaattgctggtttataggatacatatgtgtttagctttagtcaatactgccaaacagatttcccaagtagttgtaccagtttaaactcctactagcagtaggtcgtgttgctcttccttatcaatacttagtattattatcagtcagtgtttctaattttagccctcttggtggaagtttaggaatatctggtggcttaaatttgtatttgtgtctagtgtttagaatactttcacatgctcaccagtcattttactatttaactcttgcttacctataaaatttgaagcttggctaataacatcttgtgtagttcaaaatcactagttgaatgaattttctgaaatgaggcttttaaaaataaacttaattggctggtcatggtggctcacacctgtaatcccagcactttgggaggccaaggcaggtggatcacgaggtcaggagatcgagaccatcctgaccaacataatgaaaccctgttgctactaaaaatacaaaaattagctaggcttggtggcatatgcttgtaatcccttttctgagaagtctttaatagatactctctaccctcttctaatttactccctttccaagctttttattaaggaaaaatcaaacatacacagatgtagataaacttccatttgcccatcaatcagcttcaactcatggctagtcttttttacctacccccttccattttgatgcaaaacccagacagcatttcatcttacatatttcagtatatcccattctaatttagatgtttttttccttggtgctcatattgtgctgctctattgtaaattataagttcaatttagttcttacatattctctcattctgctttgtaaacttctcacaggtaacaatcactaacacttaacacctgtgtgtgaggatctatgaaattgcttcacctgcataaattctttatattcttacaacagctctaaaaggtagatattactgtctctgttgtatatataaggaaaccaaggcacagaggttgaataacttgtccagcttgtacacctagttaagtggtagaacaggaattcaaactaaggcagtttatcttcagtctttagtgttaactactgcattacataatgtctgagtaaatgagcgctctactgcatataagttccttcaatcgtcctttttaattagcattttttccttgttaattttgcctcctgtcttgcatttccaacggcacacaagtattatttgctctttcataaaatctagctaaaagggcccttagcatgcaactctcttattttttatttatttaaaaaaaattttttttgaaatggagttttgctcttgtcacctgagctggagtgcaatggcgtgatctcagctcactgcaacctctgcctcctgggttcaagcaattctcctacctcagcctcctcagtagctgggattactggtgcccaccaccacgcccagctaatttttgtatttttagtagagatggggtttcaccatgttggccaggcaggtctcgaactcctgacctcaggtgatccacccgcctcagcctcccaaagtgctgggattgcagatgtggccacctctcctgttttaaagatgatcatcccttgcttttagctgttctgcttctaattttatatgtgatattctatcaaaaaattgctgacctctggtctttttgtttaataatagtgtctctataattatggggagaaggtaccacatactgaatttaaatattttcgtcttttatatactatattttaaatttttaatgtttttatttttgctttaacattgtatttgaaaatttcatttgcagtaactcgatacagctttcactttagatttttctgttttgagtattagcccttccggtgttaatttgagtgttcgaatctttaggattaattgtgcaaagatataaagactttagagaagccagccaggcacggtggctcacacctgtaatttcagcactttgggaggcttaggcgggtggatcacgaggtcaggagttcgagagcagcctggccaatatggtgaaacccagtctctaccaaaaatacaaaaaaaaaaaaaattagccgggtgtggtggcacatgcccgtagtcccaggtacttaggaggctgaggtaggagaattgcttggacccgggaggttggctcactgcaacctccacctcctgggttcaaacagtctccctgcttcagcctccctagtagctgggattataggcgcccgccaccacgcctatagcaaagatcgcactactgcactccagcctgggcgactgagcaagactccgtctcaaaaaaaataaattaaaaaaaataaataaataatgactttagaggatacttcttctcagatctttcttagtggaatttgtgtatgtaaaactattacagaaacaacccaaatgtccattgtccatcaagtgatgaatgcataaataaaatatacaatggaatattatctgtcaatgaaaagaaatgaagtactgatacatgctacaacttggatgaactttgaaaatgttatgcttaagtgaaataaaccagtcacaaaagacctcatatcacatgatgccatttatatgaaaatagattagcatgggactgaggggaggttggagggaagggagaatgctattaatggtatgaagtttctttttgggggtgatgaaaaartaatctgagatcgattttggtgataattgtgcaactctgaatatactgagaacctttgacttgtacactttaaatggacgatttgtatggtatgtgaattagatctcaagggtgttattttaaaaaacttaaatataatttataatgataatctcattgattaaacataatttgaaattttttggtgtactttttcagattctttacatttatgatttaaccaatctggttttggaagatacaggcagaaagaacacccagtggaggcacataaaaaatgttaytagactgggtgcagtggctcatgcctgtaatcccagcactttgggaggtggaggtgggcggatcacttgaggtcaggagttcaagaccagcctggccaacatagggaaaacctgtctctactaaaaatacaaaaaattaattagctgagtgtggtggcacacacctgtaatcccagcaacttgagagggtgaggcacgagaattgcttgagcccaggaggtggaggttgcagtgagttgagatcacgccgctggactcaagtctgggcgacagaacgagactgtctcaaaaaaaagaaaaagttaattattaatactgccttgtctaaaatgtcataaatgaaatgagatctttcttttcagtgtattgggttagcatttcatgattgggttagtaacttagaaaagttagataattttgtcaaaaattggtaaaaagctgttaacagataactttgagtttatcttttttttttttgagacggagtcttgctctctcacccaggctggagtgcagtggtgcaatcttggctcactgcaacctccacctcctgggttcaaacaatctccctgcttcaacttccctagtagctgggattataggcgcccgccaccacgcccggctaattgttgtattttttagtagagacagggtttcgccatattggccaggctagtcttgaactcctgacctcaggtgatccgcctgccttggcctcccaaagtgctgggattacaggcttgagccaccacgcccggcctaactttgagtttatcttaacctgttgtttcaacagagtagattgatagttaggcatacccgcattctgtaacatttgatgtgacttatgtctaatattaagtcaacattgctcacctattggctgatttagggactgggatttgtcggaacttcacagcctttgtaacgatttaaaaaaggagttaagaaaggtgttttctttttaaaataagtcttttcgttttgatgatatttttcaacattagtacatgcatttttggattatccagatgactgcctcataatcaagaactgttaacatcatttcggtacttatgttagcttaataatgtgttggtgccaagggcaaatgatgtcacaggatactatgtgtatagagtagtgtaatcattcaggtagaagtaggaacatatgatggtggtatagccatgcaaaactcgaacccatgccttagcattcagtaatacactgccatctgtcacgttatattaatagttttatttgtattccatttataaatttattttagttttagttatgagagcagtaagcataaggaatttaatcctaatttcatttctgcatttatttaagcaacattaaaatagaaagtgattaaattagtttttaaaaattctgttatgatagaaccagaatttgcaagcttgagccagcttacttaatattattgctggaaacctagcatttggcattaggtgactggaactgggactgcagttttgtatttactaggttatttctctatttatgaaatgggaaatatatttctaactaaaagggtcgttcatttgttcattctttcactcaacagataattagttgtgtagcaccacataattttatctcattactagtttaattttccctactgtcaaattttcttcagagccagcacaaaatctgataggaatattatgctatgaattgtcttctagaaggtaagataccacccccactcccccttttttgagacaggttctcgctctgtcacccaggctgaagtgcagtggcgtgatcatggctcactatagccttgaactcccaggcttaagccatcctcctgtctcagcactcccagtagttgggactacaggtgcatgctaccacgctgagctaatttttgtattttttgtagagaaggattttgccatattgcccaggctggtgtgctgggcaattcctgggctcaagtgatctgcccacctcggcctcccaaagtgttgggattacaggtgtgagccacttcacacggcctatacctttaacttgaaatttactttttaaaaaataggacaaaataattttaaaatgtggtaggattctgttgtaatgcaatggaataacagctatatcagtaaaactgttgaggctgttcatttatttaaaaacctaagcaattgtggtgtgtataccaggagcagcaaattctgataatttatagttgggagaataattttcctctgggctggtctagagattatatttatagggaccctctgaagattcaaaaataagaattgtcaagaggggataatcagcatttcaagagaggaataaccagcacttgttaaaacacctgctctttactgggtccctctgtgtgtctggtacttcacatacattctcctattaaagcttttcaacagtctctggaggtattagccatcttgagagagaaaaaaaaaagatacctggagttagaacatcatctgttgtcggcctgtctgctatgttgcagtatatgcattgttgaaaacytcatagtctgcaaaaatcaggtaccaaaaactaacaatgtgtatagggaaaaatgggcttaagagtaaactgatcacttcaaagctatgttactttgtaattagagcactaacaaaacaataaaaattccagtaaaatagcacagttttgaagatcctaaatttctgacaaactacaataaatataggacttgaaaaaggtagcttgatggaaggggcaggtataagggggagggttggggtgactgacttagagagacaaagctaagatgcataaatatcaggtggaactgcgtacatacttctgagacagagcatgtggcctgackaagccaagaagaataatgtggggctaggaggtggtggtgatgagcatctggttcagacctataacccccaaccccatgctgcattcagcttctgttacttgtgggtacaaaacatcaatgtgttgggggaaaagtggcaaccactattctactttgtgaatttgacgactccaggtacctcataagtggaatcataaaatatttgtccttttgtgaccgctttatttcagttaacatagtgccctcaaggttcatccatattgtagcatgtcaaaatttccttgctttctaaagctggattattttccattgtttgtatgtatattttattgacacattcatctgtcaaayggatacatatgcttccacattttggctattgtgactaatgccgctatgaacatgggtgtacaagtatttgttcaagtccctttcagttcttttgagtgtatacccagaagtggaattgctgtatgtatcatatgtaaattctgtgtttaactttttgaggaatcaccatatgttttccacagtggctgcaccattttacatttcttccagcaatgcacaggggttccagtttctccccttatccttgctatcacttgtgttttctgcctttttgattatagccatcctagtgatatctcatagtggttttggtttrcatttccctgatggctaataatgttgagtatcttttcatatgcttattgaccatttgtatgtcttacacattcagatcctttgcccatttttcaattgagttgtctttttattattattgagttgtatgaattctttgtatattctagatacaagtcccttactggatacattatttgtaaatgtttttcttgtaatttgtgggctgtgggttgtcttctcactgtttacagtgttcttcggagcacagaaattttaaaattttgataaagtcccatttaactatttcttttgttgctcctgcttttggtattgtatctgttagaatccattgccaaatcctaggtcattaagatttaccctcatgtttcattctaagagttctatagtttttttatcttatatttaggtctttgatgcatttcatgttaattcatgttgttactgggaaacacttctatatgtagtaggctcaacaatgaattatacacatgttgtgttacacaatgcattttaagtcagttaagagaaagaaatatgcagtcatactgttttcttataattgcataattgtatttaccagtgttatttcactgagtttgtgtcttgtcatgctcctccggttgtcatactggaagtatatttctgaattaatttttttttttttttttttttttttttagacagagtcttgctctgtcactcaggctggagtgcaatggcgcgatcttggctcactgcaacctccacctcctgggttcaagcacttctcctgcctcaacctccaagtagctgagattacaggtgcctgccaccacgcccagctacttttttgtatttttagtagagatggggttttgccatgttggctaggctggtctcaaattcctgacctcaggtgatccaccagtctcggcctcccaaagtgctgggattacaggcgtgagccactgcacccggccctgaattcatttttgaaataaatttggttgatagttttctttctttcttttcttttctttttttttttttttttgagacagagtcttgttctgttgcccaggctggagtgcagtggtgtgatctcggctcactgcaacctctgccgcctgggttcaagtgattctcctgcctcagcctcccaagcagctgagattacaggcgcccgccaccatgcctggttaagttttgtatttttagtagagatgggtttcacaatgttggccaggctggtcttgaactcctgacctcgtgatccacccgccctggcctcccaaagtgctgggattacagacgtgagccactgcgcctggccaatttttgtatttttagtaaggatgaggtttcaccatgttgaccaggctggtctcgaacttctgacctcaggtgagccacctgccttggcctcccaaagtgctgggattacaggcgtgagccactgcgcttggcacgatagttttatttctttcagtgcttgaagaatgccatcccactgccttctggccttcaagttttctggtgagaaatcagctgttggtcttactgatgatcctttgtatgtggtgatggatgcactttttgctgcattcaagattgtctttgtatttggcttttgacagttgatgatgtttctcagtctggatcttgaatttatcctacttggaatttgtcgaacttcctgcgtgtgtagattaatggttttcattaaatttggaggcagtttttgattctgatttcttcaaatgtcttttctgttcccttttctcccgtttctggggctctcattatgcatatgttggtttgcttattttgtcacacatttctctgaggctctgttcattttttttctctgttattcagattgcttaatctaacagtctgtatctttgctgattctttgttccgacagctcattggctgaatttttcgtttcagttattgtacttttcaacaccagaatttccgtttggttctttttgttgttaaattctgttagtctctgtttgtttagaaattgtcatattttacttctttaagcatggyttcctttagttcattgaacataagcataagagctgtttttgaggtctctgctaagtctggaccttctcaaagtcagtttcttttgcctactttttttctgtatgtggggcacacattcttctgtgcatgtcttaaatttttttgtttaaaactggaccttttatataatatagcaactttggataccctacacctctagcagctttgttgtttgttgcttccttatttatgtagtgactggctgaactattttagtgcctacccctcagcctgtgatgttgctcttcagcgggtgtagccttagtcatgcctgggatgatggtgattttagcaaggctttgtgagtttctgtgatctctctgttaaacctctctctgtgttggtatcacatgcacatattagcctctactaattgcctactgattggtctgttgatttaaatgactccttgggacataaattgccccacagtctgatccagttaaattctcatgctttccaggggtaagtaatctttgaggctgtgtctgaggtttgttctgaccccaggaaggttcttagcttttatttccctggttctatctggtaagctgctagctgagtagtttaacttgttgctgtccaccacaggtcttttgatagctgcttattaccatgatctctcctgttttgtgttgttttccaacacaccctcaggcagcatattaccatattgtttcaaatagttcactttaagacaacttcagaactctgttcttacggcctgcctttccccctgggcaaaatctttacaccactgcttcagaactgggttggactgtggctcacttctcagagtgacacctctgcttcttgagcagggtgattggctttgcctgccatggaatcttgactctgagtgaggtggggtgggggccattaggaccacgcttttcttgacttgctgcacctggggttaagagcgtctgcctcacaagtggggcctagctggaaaaaagagccccagacttcttagccactcttggtgcaatagagcctgtgcaactcaaagttgggggtgttgagaaatgctgcctgcctttacctcctggggagataccatcaactgggagctgggtcgggggaggtgtgttcttggccgttctcacctggagtggagctactgtcctgctgagctggctcaaatgccacagactatccttactgagatatggtagattttcttaaataaattattttttcatttggtatatgcccttaggacaatttccagaggcttttagtgttttttgttttttaaaaaaataattttcaccagttaacgattgtttcactggggagagcatttacggagcctttgakggcaccattccaaaagttatttttaatgtaaaattactcaaattgcctacagccacttaaaaatttgtgtttgagaatgctttggaaaagatgctgaagtttatatgtatgtaaaagcttcattactctaattgtgtacgtacaacttgacagatgctcgatatggaggaggtttgaataagggtgtttggccaattactgagcatttctaaaagaatacatttctgctgccacaaagaattttgaatgcaggatgcagttctgttgcagtgacttataggaagtagccatggatgtacacagtaatttagtgacaaaaatcaggaatctgtaaggggtgtgtatgtgtgtgtgaatagtgttggaaataaaatacgagcatttagctcaagtaacatatttgaatttaacaaagattaattggacatctttatttgcattaacctgaattattgattggatttaaagctgtctagaagtagcatcacactggggatggggggggcaggaaacctgtgcttaatacagttatcttgactggctttgggtataatttatcataatgtgtgataagaatgataaagtctgtgcaaatgataatggcagtgctggtggaactaggaaaagaaaagcttttacctttgagcaaaggccacattttaaaataacttagggatgtttaggtgtatagctgtgggctcaactattaaaaataacttactgtatttcagactccttaacatgaacctcctcatttaacacactctgtcagagggagagatccccagacttytcagccactcctgcctgtttgagaaggattctcaaacaccccctcccccagagaaggggcctcattttgttgcccaggctggcctcaaactcctgggctcaagtgatcttcctgtctcagcctccggagtagctggggctataggtgtgcaccaccacagccagctaatttttataacatgattttttattccatatatctgaggaatacagctaattgtgtcttagttccttgatatgtactataacagtgacaacgatacttaacatgcagaaattgtgaattaagtgaaaaatccaattttgtaaaacatgtttctgcatcaaaaactaaacagtttgtcttgggagtggggttatggtgagattaatggtagtttccccctcccttttctgacattattgatgtatggtgtgatagttaaaactgtaggacactggcacttgtactgtctgagtttgaatcctggctcctaccactttgacagcctgtagtcctctgtcccagtttttttactcatgaaattgggctgataatagggttgttctaaggattaacttgcttagaatagtgcctgagacaaatacttaaatgttagctattgtcactattaatgaggaaaatgttatttaaaatttgaggtgtgtcaacctggctgcactagtattgaagttgggaaatgagagacaaagttggaaaaataagttaaaggctgattatgaatgaccttgaatatgtaccagatggagaagagaagccattcaaggttttagagattgaaagtgttgagattaatttagcattaatatactgaacgattggtatggtagtgtggacgctagccaggatgctgttaaaataggagtctaggctagagtggtttgagtgggagtggaaaagataacattggacacatcatgaaagaagaatggaggagatgggaagggagagatttgactttgtttttactgtatttccccacactcccaattttagttttgagcactgctatagactgaacgtttgtctccacccctccacctcgcaaattcatatgttgaaacctaaccctcatgtgatgaggtggggcctttgggaggtgattgggtcacgagagtggaaccttcacaaatgggattagtgcccttgtattaataaaagagactccagggagttccctcactctttctgccttgtgaagatacagtaagaagattgctatctgtaaaccagaacgcaggccttcaccagacgctaaatatgcttggcaccttgatcttagactccccagcctccagaactgttaagtgttacttgagccactcactctgagcttttgttacagaaggggctaagacaaacaaacacctgttgtttgccaatgaatccttgggattcagtgatgagcaaagcttgcatagcttctgcccttaaggagcttttatgttttagtaagaagataaactcacacaggtgctatgagaaaatagggtagctggctcctagagtctaggatgtgagtacttgatgaatcctgagtcaggagagttgggagctgctgaattaatatgggtaaaactaagcagactgctttgttcagaggctctcagaggtggcatgaaggagcactttgtgaaggaacaacaagaaggcaaattgaactggagtttgaacaagctttggctggggttagctgcaagatgaggctggaattgggtgtttgagggccttgtagaccattagataagtattttgatcttcatcctggtctttgaagattttttttttttttttttgagacggagtttcactcttgttgcccaggctggagtgcggtggcacaatcttggctcactgcaacctccacgtcccgggttcaagcagttctcctgcctcagcctccctagtagctgggactacaggcatgcaccaccatgcccggctaattttgtatttttagtagagatggggtttctccacgttggtcaggctggtctcgaactcccgacctcaggtgatctgcctgccttggcctcccaaagtgctgggattacaggcgtcagccactgcgcccagccagtctttgaagatttttaagcagtgctgtgacatattttgcatttcagtaaaactcatagtgatgatttttaataccgaaagaacaaaacaattgtaggaatggatgcaggcctgacagtcactgctttcaaaagaaagctcaatcccttttccctgttgtttccttttctccccgtttgaatttatagagaacaacagattctgtagagaaccttcatggtatagttggaagagccaagggttttagagtcttaacggaaattattgtgatcttgtataagctcagtgtacttaatctcttagcttctatttatgtctgttaaattggactgatggctgtatgagataggtattatgattaaatgagattatacaaataaagcacctactgttgtgcttgatacacaagtaagtacttaaaacttttcaagaataatatacaaactaagaactggaaaggagccacagagaacttttgaatggaatggaaccaacaagtccacaaaagaaaaaaaatctttagcataaatactgagacctgtttcgccttgcccacagggtggttatggaccatagtgtctaaatataattgattgtgaggtgtatgctacaagtaattataagcaattaaataattagttaaaatagtaatgtttgcaaatgagattacctaaaaatattagagtcaagattatccccttaataattattttcactcacatttcatgtgttttcgattgaggcaccaaaagaatccttgaagtccagcatataagctattaatgtttgctgtttttattttgtgctctgctttatacagtttttgttttttggcaatttctctgtgtccatagaagtgtgtcaaacctgtgataaccttattttagtgtcctttctcatgctgtggtagaaaaactgctgtgtaggttactttttcttctagacaacaatgcactaaaattttgtctttaaaaacataattgaatctgtcatagcaacagcatgttcaatttaaaaattcaaaaagatctaaacttggcttaaaaatacgtttttttgttgttgtttttatttgagatggagtctcgctctgtcgcccgggctggagtgtagtggtgcgatcttgctctctgcaagctctgcctcctgggttcacaccattctcctgcctcagcctcccgagtagctgggacttcaggcacctgccaccatgcccgactaattttttgtatttttagtagagacagggtttcaccgtgttagccaggatggtctccaactcccgatttgtgatctgcccgcctcggcctcccaaagtgctggggttacaggcatgagccaccgcgcctggccaaaaataagtatttttgtactctaaaatggtgggcattttgaaagaaagcttagctgaaaagatgctgcttactggattgtaataaacatgaaacaattgatttatacattcacattataattttaaatcagtatatagttgacccttgaacaacatgggttcaaactgtgtggtccactttcactgcagatttttttcaataaatatattggaaaatattttggagatttgtgacaatttgaaaaaaacaggataaactgcatagcttggaaatactgaaaaaattaagaaaggtgtgtcatgaacgcgtaaaatacatgtagataataatctatttactaccataaaatatacataaatctattataaatttaacatttatcaaaacttaatgcacacaaacgtttttatagaccacatgtggtgccacgtgcagttgagagaaatgtgaacaaatgtaaagatggattaagtcataactgcataaaattaactagtacattctctactactgtaatttcatagccatctccttttgctactgcgatgagtttgttgtaagtatccgatgaaaatatgtgacgctgatctctgcatgagcagttcatctctccagtaaatggtctatcatagtaaaaaatgatctctcatgttctcatgtatttttcatcatgtttagtgcaataccataaaccttgaataacattacgggactcatgaagtgycactagtggtgctggcgaacaggctcccaagaagcagagaaaagtcatgacgttataatgttctgcaaagtttcttataagaaaaagttgaattgcttgataggtaccatagattgaggtctgaggtctgcagctgtggttgtccgccatttcagatgattgatcttgtaaacagatgatgtaattttactttattggtaaaaacagtacagtactataaatacattttctgattttcttctttccttttttttcccttttcttttttttttttttgagactatctcactctgtcacccaggctagagtgcagtggtgcgatcttagctcgctgcaacctccacctcccgagttcaagcgattctctgcctcagcctccctagtagctgggattaaaggtgcacaccatcacacctggctaattttttttgcattttttattagagacggggttttaccatgttggccaggccggtctcaaactcctgacttcaagtgatccgcccgcctcagcctcccaaagtgctgggattacaggtgtgtgagtcaccaccccttctgagtttctttttttctctagcttgctttattgtaagaatacagtattataatacatgtaacaaaatatgttagtcgcctctttatgatcagtaaggcttcttgtcatcagtatgctgttagtagttaagtttctgaggaatcaaaagttatttatgggccgggcgcagtggcttatgcctgtaatcccaacactttgagaggccgaggcgggtggatcacgaggtcaggagttttagaccagcctggccaacatagtgaaaacccatctctactaaaaatacaaaaattagcccggcattgtggcacctgcctgtagtcccagctgcttgggaggctaaggcaggagaatcacttgaaaccaggaggcagaggttgcagtgagccgagattgtgccactgcactctagcctgggcaacagagcaagactccgtctccaaaaaaaaaaaaaagaaaaagaaaaaaaaaaaaagtagtgaggtctggcgccctctactggtgaaggctaagtatagcttgtgttgtacagttaggtctcttgtctctagtgagtcaaatattttaatggaaaamcaagggttatagatgtcggttaaacatagaaatttgaaaggaagagaagtaattccctttgattgttggtgyataaaaccggaataggcaaaattcmcaagtcaagattaatttccaagtcaagataatttccatgtttgagcttaaggatgatctatcaaattgttttctaagaaactcatttcactttgatgtccagtaaaggaaataatctggtagggggttggagttgctgttgcttgtttattgtctctatccccagtctgtaatgttccacaaaagcagagatatttgatgcactgtgtacttccatatattctcctatgattagaacaatatgtgacccattgcagatgctcagtacacaatttttgaatgactaagctttgagtttttatttaaacaccttttttttggatgaaaagaaaaattgagagaagaaaatcttaagtatcctaggatcatatgtagaatcagaggatttcaacgtgctgtataaaaggagagagattctggaacatagggcaaattttagcagagttgggataatgactgggtaagaaaggataattctttgttctaaaagggatttctctggtattaargccctgtgtgaaagctgctggagaaattcagttctgcaaagtttaaagtaaatggtttgctgtttatggagtactagattacttaatgcagtccagcctttatctaggtaaaggtgatgcttttcccattgtggaagatgttaggatgctaagtttgaatatgaaaatgtgttgtgtgttgtagaggcaatcaaatcaccattttggttgtatttcccattgagaaaattaaagatgcttctgtttgtgtaataattttgtttttatgaaataaagcgtaaaacttcatgtggtaaaatttcacactgtgattcattgtatttgagcatgcctatggaaagtgattgttactgtgtcaaatattgaatgatttgaataattactaagttgttcagttgtgtgtaggatactgctgctttgacttggtagagagcttgttctagccctgctaggtatgcctaaatctctgtgacataaaaaacaggctcttttagagttgtgagactgctacttgaaatcaggcaaagctgtgtgattcccagctgtttccaccacttgagtattgaataggatttattaagaaaagtagtggtgttattcttggataacttagttgtatctgtgataagtttttttctcccactcaaacctttccaaattatatctgaaggcaatattttcagattcattcctgaaatatttaggaactctgcacagtacattgtagaaagggaaaagaaaatttacatttttttgagaattactgtgcttgctatttgtgagactccttttattaaagcaattctcatggctttcttttttttgtgtgggtaatagcatctcaattttaaatacctggaaaaagaatgagagaggttgttactttctttttaagataggcagattgtaagtgacagaagttggattttgaatgagttatgtttgaatccagaaattatttttaattgctccatgcctatttcctgctctttatcttgcatcttagtgtgctgagggaaagggatcaaattcttatgtggtagtagagagatgcagcagagtatgctatgctgagacctgacatacctgctcagcaataccggaaatatagaaatgaggacagcttgtcgggtagaagaaacagaaaccaagagctagaaaggcgagactatataagagatagggatagcaagcagcttgaggcttttgctgattgagtgtcctgtcataagcagaagatgatttagttctgtggtcttagagaaaggtgttttgagagaggagtttcacactgccgcttttcccatttatcttagttattttgtttaaagggatagtcccttagttatccacatgatacttttgtctagaataatttataccatgacttttgccagatatttctgatttgtgtatagatggttactgaattcatatagatggaaggatattgtgcataaaaatatgagaatataattttgaggtattttagctcaaatgatctccaaatgctaaaagaactgcaaggtaagggaacagtgagtactctatatatacaattttactgtgggaaaatatacataaaatttaccattctaaccttttttttttcttcttcttttttttttttttttgagacggagttttgctctgttgcccaggctggagtgcagtggtgcgacctcggctcactgcaagctctgcctcctgggttcacgccattctcctgcctcagcctcccgagtagctgggactacaggcgcccgctattgtatgtttattagaggtggggtttcaccgtgttagccaggatggtctcaatctcctgacctcgtgatccgcacaccttggcctccagaagtgctgagattacaggcatgagccaccacgcccggcccttttttcttcttttttgagacggagtctcactctgtcatccaggctggagttcagtggcaccacctcggctcactgcaacctctgccttccggattcaagcgattctcctgccacagccttccgagtagctgggattacaggtgtgcgccaccacgcccagctaatttttgtatttttagcagagacaagtttcaccatgttggtcaggctggtcttgaactcctgatttcaggtgatccacctgcctcagcctcccaaagtgctgggattacaggcgtgaaacaccgtgctcggctgattttaaccatttttaagtttgcagttcagtggcattaagtacattcacattgtgggatgcttaccatcatccatttccagaacttctcttctttccaaactgaagcgctgtaccccttaagcaataactccccatccccccagcccctggcaaccatcattctactttctgtttctgcaagcgtgactaatctgggtacccgtgtacktggaattatgcagtattgttcttttgtgaatgacttatttcacttagcatgatgtcctcaaggttcacccatatcgtagcacctgtcagaatttcctttctttttaaaaaatactaaataatccactgaacataggtaccacattttgttcgtccttgkattgcttcctggaaagacttttaaaagagacacagtattggcttagtagacaaggtgatctccctggccccctacttgccccacacttgggaatatatagtcgctaacctcatcactctcaggaggagatggtagggagtggaggttgtatttattttcgggaaaaaaaacagactcccaggtggtgctgatgaatccatctcttcctacccttttgtgaatagttgaatctgtgttcaagattcccaagttttgcctgaattctagacgtgtagagccaactctctagtggttttcacctcagtttcaatgttaagaactgtacgaactgccactctacccctttccttggaagagaagtggacgggaaacctggagtccaggattatataagccaaggaagctcagagtttcaagaagggagaggtggtcagtgtctaatgatgagaagagggcaaacaggatgaatattgagaagcagttatttgatttgtcagtaagtagaacattgatctgtggaccttcttctyatgcgtcccctaatgcacatactcaaaagctttgtatgtaatttttaggggaattaatcttgaagcccatccctacgtctcgattaagaccttctggcttaaagcagttttagttttagtagctttggatggagccaggtgatgagagagaatggacaaagtggaaggtgagatgggcggggcatggtggctcacatctgtaatcctagcactttgggaggccagggaggagaattgcttgagcccaggatctcgtgaccagcctgggtctcaaaacaacaacaacaaaaaacccaaaatttacaacttacctactttgtcttcatcacatttatttaaaaagaaagagaagggggaaatggagacagtcttacgacttgtgggaaaagggaagggcagacactggtgattttcagtagggaagattcaagcacaggctgggaaaagattgattggggatgatgatgattggagcatcatcccttggagagggtatacaatgggatcatgaccccaagctgagggacaagaaaaagaagaaactggagcagatttgaagtagacaagaataaagttgaattggttagctaatattttgagtgccaagaaaataattattcacatattagccaggtgtggcagcacgagcctgtagtcccagctactcgggaggctgaggcaggagaattgcttgaacccgggaggcggaggttgcggtgagccaagattgcgccactgcactccagcctgggtgacagagcgagactccgtctcaaaaaagaaaataatcattcacataatttgtcagcagacccaaagtggctaaggaaaatgatatgcaagtttctcaaggttttgaaaattgtctgcttcacgtaacactctttgtaatttagggtgtataaaatggataacaaaagcgaaagagggactgcttaaatcagactttttcattttttttttccactttatgtatttaaagagcttctatgtctttagactcaccagtacttgatagtatcagtcttaaaactttgttttgcttcgccagtttgatcagtggaacaaattttggttttgtaatttgcattttcgcaattactaatgaggttgagaggcaggctagtgtagcatttaagagctatggactccctgggttggaatcccattttgccacttagtacttactgatacggtaatttacttttgctctctgtgcctccctttccttacctgtaaagagggatgatactagttcctactgtatacatttgtaaggattacggtgctacaaacagtgcctaacatgcgaaaagctctattttaaaattatgtcttatttcatgtatttattagtcacttctatttctttttgagaagtctatcttcatatctgtttttctacttctccctgaagcttctgaattttgcctagaggaggacatatcttttttgtgtgtgtgacagagtctcgctctgttgcccaggctgcagtacagtggtgccatctcggctcactgcaagctctgcctcccaggttcacgccattctcctgcctcagcctctccaggtagctgggactacaggtgcccgccaccacgcccggctaattttttgtatttttagtagagacggggtttcgccatgttagccaggatggtcttgatctcctgacctcatgatccgcccgcctcagcctcccaaagtgctgggattacaagcgtgagctaccgcgcccagccaacatatcttaacaaatcagtttttgtgtgtgctttagtcaagttttttttttttttttgagacagggtctcgctgtgttgcccaggctggagtgcagtggccccatttcatctcactgctacctccgcttcctgggttcaagtgattctcctgactcagcctcctcagtagctgggactacaggggtgagccaccatgcctggctaattttttttttttttgtatttttagtagagatggggtgtcaccacgttggccaggctggttttgaactcctgacctcaagtgattcgcttgcctttggcctcccaaagtgctagaattacaggcgtgagccactgcgcctgattttaaacatattcctctagcactttctatagttgtttacattttcctcattaatctgcctgtaatttgtgtgtatgtcaggtggtggcaggggttaaaatgtacgtcaacttttttttgacaatgatagagaacttgaagaggaagaagtcttagagtcagatgtgaattagagtccgctctgcataacttaggcaagcccctgctgtctcttatttttgactctgtaaaatggagataatactcaatttctgtgctgcatagactgggtatgagaatcaagtgagttgtggcagagcacttcgaaacttcctgcagtggcttggtaacctaagtggtgaaaaatacttgggtattaatattacagaagcaagcccccaggtaagttttatataccatggtatacatttggttttgaatgtcttaagccaggtcataattagaaaacttagaaatgaaactttgcaatgcttgtgggaagtctctctcaatctcttgagagccagtgagttagaaccaatcagttaagtttctctatctggtggcaccttagagtcattcactgggggagattttttgcaaagttctgatgcctaggccttactcccagatactgtaatttatttcatctggagaggaacctgggcatcagtgttttaaacaaaatcacttcaggtgattttattgtgtagctgaagagggctactgatctaatgaatatagaattgaggatttggtagcattctcctgtacttgtttgctggtcagtttgtaaagaagagttccctgttcttaaacagttgtggccttgtaaccctgttatggctctaggagtggctggagccaaaaccttgccaaagtagagagctgagatcatctgacaaattcagttgtattggagtattatgtagtttgaaccctcttaaaattttaccagaggtttttggggggttttcagggttttttgtttgtagggggtggagagagcggggatcttaacagaaatttgttctctcacaattctgaaggccagaagtccaatatcaatgtgttggtaggtttggtttcttctctggcttgcaggtggccacctttttgctgcatctttacgtggtctttactctgtatgcgtgcacccctgatgtttctctccaaagcgtcaaagtttatgttaaaagtacttagaagctagtttaaaaaaccatttataatgccctagtatcagtgataaacgttagttgtgcggcctgccttgaaatgttttaaaaaatcactttgtactttgtctaagtacacatgttactgaaacaggagagttccctgacgccctcacaggatgtgtgacaggggtgtggctcatttattcctcttatgggaaggggagcacacaggtgagcaggtacaggagccagggtgagcgcttttgggctccggccccacagcagtgtctaggagtgttacaatgctcctttagccctgctgtcccagcataagtgttaaacagctcagagaagagtcagtgtgacagcctttttgggtttctgcatttagggcatcccgagttcttttcctgtgtctgggaagaatcaggtcacagggacttgaaggatggtgaatgtggggatgttattgagtggtggaggtggctgtcagtgggatggggagctggagaggggatggagtgggaagatgatcttctcctggagttcggctatctcacagccaatctccaacggcccccagcttgaacctcctctccacctttagacacttcctctcttctctccttctctgctgtgcttctctgccactcttctgcttttggagcctggggcttggggtttatatgggcacgggataggggtgcgtggcaggccaaaagggaacacttgggcgtgaaaacaggaatgcctgttctcatttagggctgcaggtccaggcttgagccctcaccagggaccccaccctcatacctcttgtccttattcttacagtgtaatgaatgcatcagcaaattgaaaacagatagtttttgccntttcttaatttaattaaaatgacagttaagtactttgatatattgcctttggagtcatttccaggaggctatatttgtttgttttcttggtataatggccagtgtaccaatgatcagttttaagttaaatgtagtattaatgaaacttcagctttttactttctcttcttgtttgtatagcccctttttcctgattagattcantggtgatactaaattcgaacagttccataattcatgttttttatatctaaaaccaattactttttcccctttctatttgtaggttatgcaatggtctctgcaagatggtttattcttgaattggacctttttaagactgacaaatgctggtacttcatcttctataagtggactataatttcttttctcaagacaactacataagcagacaaaattgcaaagatctgmcctgtgtcgagtatgacagccacgactcgtggctctccggtcggagggaatgacaaccagggccaggctcctgatggacagtctcagccccccctccaacagaatcaggtaggatgttgaagatactagttaaagctacagtggggctggactcagtggttcacatctgtaatcgcagcactttgggaggttgaggcaggcagatcacttgaggtcaagagtttgagaccagcctggtcaacagggtggaaccctgtctctactaaaaatacaaaaattagccgggcgtggtagcatgcacctgtaatcccagctacttgggaggctgagacaagagaatygcttgaacctgggaggccgaggttgcagtgagctgagatggcgccaccgtactccagcctgggtgacagagcgagtctctgtctcaaaaacaaaaacaaaaaacctacattggtgggtctactgttggggtactaaatgatggaacatgttctaaataatttgtgaagcaactgttattttaagttttgattaacaaaagtgaacacgttgggcgcagtggctcacatctgtaatcccagcactttgggaggctgaggcaggcggatcacaaggtaaggagttcgagaccagcctggccaatatggtgaaaccccatctctactaaaaaatagaaaaagtagctgggtgtggtggcacgtgcctatagtcccagctgctcgggaggctgaggcagaagaatcccttgaaccgggaggcagaggttgcagtgagccgagatggtgccactgcactccagcctgggtgacagagcaagactccatctccgaaaaaaaagaaaagtgaacataggtcttgcatagtaacaagaaagctcaagtggtgtagatggtaatacttgagtatgtagtccgtctttttctgatggcttatactgtcagtcattaaaattaactaagccatgtgtcaattctaagggggaaagcattaaatcattcagtgtagcctatggttagcattggacccatcataaatcatgacaccactttctaccccataaatacatacaattgtaaattgtcaatttacaataagattataaaaagaacatggacccaagtcatgttgcctagcgttcaaatttcagctttgtaccatacttgcgttatgactctgggttaattatataacctctaagcctcagtttgtttatctgtacaatgagggtaataatagtgtaactacttcatggactgttaaaaggatcaattgaattaatgctaaacatagattttggtattaaggttttatgctggccgcaaaactcatagggtgtacctctttctgttctctggatgaatttatgcgaagtttattatttcttcattaattgtttggaagattttactggtggacccatctggcctggggttttatttatggaaaagttttaattgaagatccattttttaatttggagatggggtcttgctcttttgcccaggctggagtgcagtggcgcgatcttggctcactgcaacctccacctccctggttcaagcgattctcctgcctcagcctctcgagtagctgggattacaggcacgtcccaccacactcagctaatttttgtatttttagtagagatgggatttcaccatgttggtcaggctggtctcgaactccttaccttgtgatccgcctgccttgggcctcccaaaatgctgggattacagacatgagccacggtacccggccgatccatttttttttttttaagtggaggaattttttaatttttagtgtcttttggtaaattatggttttcaaggaattggtttatttcatctggattttcaaatttgaggtaaagttgttaacgaccctttttattatcttttttgtgtcttggggcctatggtaatgcctccttatttctgatatttctgataccactaccaatgtcattaaaccttctaaaaacaactctcttggctttactccctccccccacacccctcccgccaacacacacacacacacacacacacacacacacacacacacwcwctctctctctctctctctctctctctctctctcgcgcacgcgcgcgcgctctctctctctctgttccttttgcttactttggatttggtttgctgttctttttctcatttcttgaaatggaaatttagataattgatttcagttgtcttttctaatatatacagttttatattgggaagtattaaattgaatggcaaaacattaaaacttacgatgtacagctcacatcacaacttaccttctatagaggtaagaggtaagttgaggtgtgtgtaaatgatcacaaacatgctgcttccaattattacatgtttatgtagagtcaggtaagtttttaggcaaaagtgttattttgaagtttttatactgttatttggggataagttcttattgtccagctattacagattagatattctatcgtaagtagtatagaaaagagcttctgtctgtctctcctttttcttctttctctgccattttagagaagtgaacaagtcgggggttttttctcccccaaataaatgtgtcagttttattccttttcctctctagttcccattttcgagacataaaatattaaagtgtatggtcacaggtcttggacagagttaagaccttcctgtgacataaatttgttagccagtattcaggtttttaaaagcgtagtcagaggtttgagttggatgctaaagatttctaattttacaccagaagctagtagttagagttccagtatctttccctcttcctttttcattttatacctgcattgtccatggaattctaaccttttttgcaatgtttctgacttgcatggctttagacaaaaatcaaacctttaatttaaccttactcttattttaaggtgtacttgatgatttttagagctcttgggtttgtgatattcaacctaatattctrtgtctacattgtgttctttttcttctaaaaactttacatttttaaagatgactggtaatttaaaataacaaaggaatgaaacaaattacattatccctcactcttacattttgtttttctctactttttaatgttaggattttattttacaagatctgacacggttgtaccaagaagcagcaaccaaagtgttaatcactgttcaatttagggctcgctttttggatatgctttttatgtgctggcataaagggaatttctaaaatcagatttttcacttaattttttttaagcatgcctttaaaaaaaattctcttagagaattttaggctttagtatgtagtaaaactcgataaatgaaacagccttggcagagacaccgtgggatgaacactcttggatgtggttgctgggagggtgcaaattttctggaatgaaatttggcagtatttgtcagtggccttcaaagaaattgtttatactgttctagtaattatatatccaggatcctatcctaaggaaaagttgaagttcaacacaaaggtttatatatgagaacattaattacagctatgtttatgtttgttagcagtaaaaattaccaaatactaaacgtccccttaattttgtttaattcatgcaatattatctggccattaatatttttttaagattcttaatcaaaaaattgaatacctagatatattgaatggaaaaggacagagacttatgtataattccagttttattgaacatatatatggacagtttttatttactcttaaagattacaaggaaataaatatcggtggtgtttataggtgtggaattacaggtgttttaaattttattttttatattttctatgagcatgtgtaaactacctgtatatcagggggcaaggagttaaaaaataataaagcaggcttccaaagttacatacttcacatcagacatttttgttggacttgtaacacttgacttccgtgctgtagtttcctgtgccttgagaccagctctgtgagcacctgcacagttttactgtgttactgtgagcacctgcacagtgcaccatttagttactaattgaccatatgagttcatgtataaactttgtgagtaaaacatattaatgctggtaaactcatctgtcttcgtgcaagtgcttatttatgcaactctttattttacaactgttaaataggtgcttgaatgataaggcgaggggcccgtttctcttaaagggccatcagcctatagtgaatagaaaattcaagaacacatgaataaaaatcagtttaaaatttaggttagtttcattttgaaagagaaaataccacctgctttctgaattaagagtaaaggtcataaaagttcattcacttagttgtgaaaatattatgcactgttaaaacggggggagagaaagacatgctaaaaatgaggaatgaaagagaaaaatagccacgttagttgaaagtgatgttacttatttaagaaccataatcatgaacttctaaataattattgtttggataatggtttgggtgtagggaagttatggaataattacattttctcccttcaaataaaaaacagaagttataaattactttataatgtataaaatgtgatgtatcatatttgtggaataatttctgtcatggcttatataatgggaaatgtaagcagagaggcagtacacattatgattaagaacacaaactatttagactttgatagaaatcctgagtatagaatttgagctgtgtgatcttgggctacttactttctgagttttttttcatctattaaatggcagtaacatatttcattaggttgttgaggattagatgaaattattttaaagcacagtagtacagagatggcctgaaacatcataaactttcaattattttatcttttgtaaaaatttacaatgcagttgtcccttagtattcatggaggattggttccaagacctcttaccacttggatagcaaaattggtgtatgctcaagtccctgatataaaatggtttagtatttgaatataactcatgcacatctttctgtatatacttcacatcatctctagattacttatgatgcctaatacagtgtagatgctatataaatcattattatgctatattgtttggggaataatgacaagcaaaaaagtttgtacatattcagcacataggcaattttttctgaatattttcgatccaaggttgttggttgactttgcagatgcagaacccatggatatgtagggctatttacaaaatttttaaatctgcaatgcttgtctatgttggtgtttggattactattttacatatgttatagaaacttaaatgtggaatgtttaatttttaattaagacttcatcgcctgattcttccaatgaaaattccccggcaactcccccagatgagcaaggtcaaggtgatgccccaccacagcttgaagatgaggaacctgcatttccacatactgacttggccaagttggatgacatgatcaacaggtgagttggtgtgtaacacccaagaaagagagcagacaggaaagtaaccccactgcctccttaatagtctttatagcttcgtcactgccaagtgctttataacccatgattcttaatagatttaataaatgaaagggagtgacagtgttagtaaaaatttcacattaatgatgatgaccctagttgggttgtttccgaagtaaaattgtatgttcagtttccctcttggagagtttatgaagtttttttctcattggtctcttggttgctggatgactttcataatttttgggatggcctgaggtaaatcaggtcatgaggacattgagttcctcagagcctgatcctagtgaactcttgactagtttgagctatttaaccatcctagatgtttcctttttttggtcttcatctcagggaacagttcagaatataatttttcacacttatagtacaaacaaccaccctatcccaccccacacactttgattatttagaggaaacctccaagagagtgaagctttaagcttttgtgcagaggaagaaaaagatttcaagaggctagggaagagcacatcaaggaatcccatgtgactgtgatcttcaccagactgtgggctcaacaagtgagtgctaggaaggtgcgacacatttccccctcactccccaaaaggaaagtaatgaaaacacatgttcttaaaggcacttgctttactgagtttttttttaaatttcattttctaaaaataagtcaacactattaaatgcataatgtgaggggaaatagaaatcctttgcattaaaaaaagaaatctaaatacataaataatgagtatgcgttaacagaaatattttgtgtaggtaaatttctctgtaatttcccccttacatacacatattcctgccaaaaattactgttaacaatcaatacattcttcagattacctttgtgtttactatcatatatgaattgatttttctataaatagaggattcttactataattttgtaacttgctttcatttatcttgaatatttttcctattaataaattccattgtttttaattatatatttataagaatacattgtgtgattctggcaggtgcctatagtaatggtatataataaattatatttaatagtggtccctgaccattctctatagcagtgataccatagcagaaggttgtattgtttgttgcttttccatacttgtctggtggttggtgattggtaataaaatacttcttaggctaaagttgcatattattagcaagttctcaggggggagaaaaatacaaatgattttttttttctttttttctttttttttttgttttttgttttttgttttttttgagatggagtctcgctctgtcaccaggctggagtgcagtggtgtgatctcggctcactgcaaccttcgcctcctgggttcaagcgattctcctgcctcagcctcccgagtagctaggactacaggcacgtgccaccatacccagctaatttttgtgttagtagagatggggtttcaccatgttggccaggatggtcttgatctcttttcttttctttttcttttttttttccttttgagacggtgtctcactctgttgcccaggctgtagtgcagtagcacaatcttggctcactgcaacctccgcctcccaggttcaagcgattctcctgcctcagcctcccgagtagctgagattacaggcatgtgccatcacacctggctaatttttgtatttttagtagagacgtcatttcaccatgttggccaggctggtctcgaacgcctgatgtcaggtgatcctcctgcctcggcctcccaaagtgctgggattagaggcgtgagccactgctcccgggcaaccctgtctcttaccaaaaaaaaaaaggggggtggcggggcaatgaagaggtttatcataatgtctcctttgatctgaatcctgaaagagcacttccctatgaattttaacaaaaatatccatgatacctaattagttaatatttgattgttataatagttttatatcctaagttatcaagataatttagttttcttccctctcttattgctgtatcttttgacagtacctgtaaaaatttgtagagacatcaggtggtgcttagtcccacaaagcagataatctgccaaccttgtcttaatattttaatgttattttaatattaatattaaatattttcatagcaagataattataattagtagctcatttgtagtgcctcttttagtgtacaaccattaagcatgtttttgtttggtaaaacttttaggcctcgatgggtggttccagttttgccgaaaggggaattagaagtgcttttagaagctgctattgatcttagtaaaaagggtaagttatatgtttttatgcttcctataatgtatgctactagatgtatttttactttatcccaaaagcggatgaagtggatttgttttcctccatcataaacacatactgcagcttgcaaggaggggctcatatcctttggacattcttaaaggatgtttgtgaactctctgaggtcacataaaatttatatttgtatttctacggagtggattcattgtttcgtcagatttgcaaagaggttgtcactcagaggttaaacatttttaattgagggtcttatctgttatgggaaatactatacaaaagaacattttacaattaagtactctataaatgatggatggtatgatggactccagacatatctgccccctgccctccttgtaattatcttgagtcatttctgtcctcaaaatattactatgtaagtctacaaattatttacacttgacctttgactgctttactgaaatgacagtgaattaggatgtgtggctctttgtactcagtaaaattttacctagtaaaatcttcattcataatccttcaggtaaaaattaccatttcattaatattgtacttctgaaataaactgtctcgcttacatatttgtaagatagggtcttgctttgtcacccaggctggagtgtggcgatgtgatcatggctcactgcagtctctacctcctatgttcaagcaatcattctgcctcagcctcttgagtgggatacaggcatgcgccaccatgcccactaattttttttttttttttttttttttgagatggaatttcactcttgttgcccaggctggagtgcagtggcgtgatcttggctcactgcaacctccacctccccggttcaagcgattctcctgcctcagcctcccgagtagctgggattacaggcgcccaccaccatgcccggctaatttttgtattyttagtaaagacggggtttcaccatgttggccaggctagtctcgaactcctgacctcaggtgatccacccgccttggcctcccaaagtgctgggattataggcatgagccaccgcgcccagctaatcttttttctttctttctttcttttttttttgtagagacagactggttccccaggctggtcttgaactcctgggttcaagtgatcctcccaccttggccttccaaagtgctgggattgcaggcgtgagctactgtacccagcctatttttttttttttattaatacacaggaaaggtgtgatttttctcttaaagaatcggaagatgaagtctcagtttttgtttaaccagcaaaaggaaatctggtgtttttactcagttgtccagaaaaaaagcttaatgctggaattaatcttttttttcccccaatgactttggtctactttaggtgcagttgaattatctaacagaggactaccattgtaataacttycaattcattttttaagatattgcagattaaaaagcagtaacatttcattttctgaaataggatagctatggatgtgttataactaacagtaggcactatcacaattgaaactgattattgtcaaaattaacatgtttagtactttaagttcaactccatggcaagggaaagtttgatttatcttttaataattcccctcttttgtttaaagaacgtgtccttatgcctcattaatcttgtagaaataatatcccaaagtgaaaatacaatacgcggacaggttacagttgttttcaccactcagaattttttgttcttttatacgttcactaattcatcaaaattttttaaagaaaatatctttttttattttaaaaatgttgaatttttatgggtatatagtaggtgtatatattttggggtaatgagatattttgatacaggcatacaatgcgtaataatcacatcagggtagatagagtatccattacctcaagcatttatcctttgtgtttcaaacaatccagttttactctcttagttattttaaaatgtacaattaaattattttttactgtactcaccgttttgtgctatcaagtaactaggtcttattctaatttttgtacccattaaccatcccgctattctttacgtccgtgagttcaattgtttgatttttagatcctgcaaatgagtgagcacatgtgatgtttgtctttctgtgcttggcttatttcacttaccatggtgaccttttgttccatccatgttgttggaaatgacaggatctcatttgtttttaatggctaaataatactccattgtgtatatgtaccacatttcctttatccatttatcagttaacacgtaagttggttcaaaatcttggctattgtgaacagtgctgcatcaaacatagtagtgcagatatcgcttcaatatactgattttctttcttttgggcatatcagcaaattttggaagacttctttgctaagcatgttctaagtcctgactgtaaaatgatggataaacactgattaatggtatttcatttaatagcattgacattcagtggacatgtattcctccctccaccatattttttttctgagaccacggttattttcaacaagttccaaatttttaaaagtttaaattaccatctcttttgtactatcaatcaaataatactttctgtacaaattgaatagtttttatttggtcattaagagttacagattttctttgtttggaagcacattgctctgttgcctttctaaaatgaggtgaaattaagcaaagatataaagaaacagagacactgagataattgagagaggctaataaggaagacaagacataattcattttatttgatcaaacacagaatagtataaggatattgatgctaaatgaatgatttatgaacaaaataagattttaaaaattgggaaatgcttttaaggtcaaagacttattttcagggagcaaaatactatttaaatttgcctcttcttgtggtgctgctgatcaccattttgtgtttaaggctagtgccataatttgtaacattttcagttagtgttaatattactcggttaatctacttttatgcaattaaatatttgttagctgtcggtgaagtttccagttatttattaccttttattgtatattggacaatgtaaaaacaaccagatgaacattttgtttgcattaatttttctccctttttcttaggccttgatgttaaaagtgaagcatgtcagcgatttttccgtgatgggctaacaatatcattcactaaaattcttacagatgaagcagtgagtggctggaagtttgaaattcatgtgagtcttgcatttgactttaaaggatcagatttacatagtgatgcctgtgagtgggaagaggtatatgtgtgtgtggctgtgttatatttattctgttataattgaattaaaaggtctaaaaatgaaaaacttaaaaatgtttataaattaagtctcttgaaggccgcatggtcatttagaataagcatgagatttagagttaagcttgggtttaatctctcctctgggatctcaagtgtctgtgaccttaggcaagtcatcacatttcattgaaaatgtaatgctatcaattgtaaggtacatcactgttttatggactattaaggaagaaaaacacccaagatggggcatttcatatacgtctgggacaccaaagggtcagtatagaggtaaatgagaaatgaacttgctatgcagaaagggacagcaaaaaatcctgcatatctcaacyttggcacttggtggagggagggattaaaaaaaaaagtgaaaatctaaaccacaagccagtatttaaacagtttcgtagtctgaattcaaattatagttgcaatacaaaaagcccttaagtggaaaatgtaaagtggtctcatgtcggtagtgcccccaagtgactagcagaagcaaacacaattcctctctgcaaataccttccatttaggaaaacagtaatgtattgttcattgattataagatagagtcagattccagagatcttaaaaagtgaaaaaagtatatgtctcagactgataaaatgccataactactctaagtctctgttgcttttgttttttgtgtgtccccccgcaagacggagtctcactctgtctcccaggctggagtgtagtggtgcgatctcagctcactgcaacctccgcctcccaggttgaagtgattcttctgcctcagcctcccgagtagctgggactacaggcgtgcgccaccacgcctggctaatttttgtatttttagkagagatggggtttcaccatgttggccaggctggtctcgaactcctgtcctcaagtgatccgcctgcctcagcctcccaaagtgctgggattacaggtgtgagcccccatgcccggcctctgttcttttgtatactatggaaatggtcataagttgtcaagcagataatatttttgtggcctataacctatttcccaaatatgaccatagcataaaaattccacattttctgatttaacatgtaattgtataggtgtagaaatggaaactttggaagtggcgtcagacttctgcatttgacatttagctagcaaatttatcttggatgattgacatattgtttattttatttatttttattttttgagacagagtcttgctctgttgcccaggctggagtgcagtggcgccatcttggcttccttggagcctctgcctcctgggttcgagctattctcatgcctcagcctcccgagtagctgggactacaggcacatgccagcacacgtggctaatttttgtatttttagtagagacagggtttcaccctgttggccaggctgatctcaaactcctggcctcaagtgatccgctttcctcagcctcccaaagtgttgggattaacaggcgtgagccactgtgctcagcctgacatactgtttagactctagaattgctgcctctcgtgtacaaattccacagagaaaaaatagtaacttgcatcttacctgtggacgtagagcaggaatagatatcttatggtgcctcttgtattttttaagccatagcaaatggcttttgaaagtaccatataaattatgaagtaaacaaattctaatttgtcctttgataatcagtttgatcccaatattaatgattagaaaaatggagagatcgttatttgttaggatacgattaatattggaagatatttctgtttgaaattgcagtgttttgatcttgtaaatcgcctttcccccttgtataacagaggtgtattattaacaatactcatcgtctggtggagctatgtgtggccaagttgtcccaagactggtttccacttttagaacttcttgccatggccttaaatcctcattgcaaattccatatctacaatggtacacgtccatgtgaatcagtttcctcaagtgttcagttgcctgaagatgaactctttgctcgttctccagatcctcgatcaccaaaggtgtgttggtttgttattttcaaaattaaataatacarttgttttgttctgacacagaatcttcagtgatctgtatttaaagtgtgacaatgaaataacactttaaatgaaaatacacacaaccaggagcctttttcgtagctttgtcgttctagttctttgttttttctgcatgtataattatccccattgtcttctgtccagcctctttagaagtagtcataatttgggttagtaggaaacagactgtattttttctttgaaatagagtaggagattacttctttgaccaaggactcaattgttgttctgtagggccgtgatcattttaggcattctaagattttgactccaaaatcaagtatatcctctaaatacctaataatacatcataaaattacagaaattgttaatgaaatcaatatagtaaatcttccaaatctcacttaaatatattgtgtacataaatgtaagttttctatattggtgtaaacagactgtacactttaaaaaatttttccctaaacgctgcttcttttaataaatattatataattttmaaattttagattttagggagacatttttaatattataggtcttgtacaaatttccctttttctatccagccagaaagattttaagtcatacattatggagaacttggtttattttactaataagctgaagttatcaaaaaaaggtcaaacttaagttgagattttctgatatttcctagttcatatagttgccactagatggcttatttttgcttgagtagatcaggttactatctaaataatggcagtcttcaaaatgaaaattttaatctatacctgtatttctttttaaattttactttttttttttctctatgtgccagtaatccacaacttaagagattcacagggcacaaaacttgatttaacatggctaaatgtaaaatttttagatgacttctggttgaagatagttttatatctttgaaatatagttcttgctattaaacttataaagtgtagcgattgtgagagtgttagcctttcaaagccttcaagagtacaatttttaaaaatatagcccaaaatatagttgcgaatcaaggagaagcatattctatggagttaccttcacatttacttgctattgaagtaagagaaattttatcatacagctaaacaggtcttctataagcttttaaaaatctgattaaaaggggacatgtttggcagcatcttcaaccatgtcctagttgaatgcagatgtcatgatataatgaaaaatctaagagatatgtaatagcctccatatgtttttttctcctgttctccaaaagtggtagtggcaaaattcagatcatcagacttagtcgatggagataaactttctaagctgtagattcactttcggatactgtttgtaatgagtttcatttacctttgagaaatttgagttacagagcttaaaagtgttttattcggaatatttttgagccttaatacttaatcattctctggagcttttggtaggtcttctgttctacttcaaattctctctacacctcctaccctcctgggacattgaacctctgtggcctcaacttttgacccatgayaaagctaaagctgtcaggactatctctcagagtgtttcctaatccccatcttcccccaagatgtttgaagatgtttaaatgagatcatttattcaaacatttaaaatataataaaaacttcattggttacgacaaaaggtcttaggtgaaattcaccatgctatctttgagaaaaggaacttgtagcaatagaaaactatgtggaaagcatatggtgaattgtaagctatgtggtcattttgaattttctatttagggcgactgatctttctctgccagtcttgaaaacttagagccagagaaggaaagctgttgttggcagctgctgaagctagcctattagcctcagtttgaagcactcttatctgaatattcccaattgtttaagcatacattgcagccaaagaaatacagaaagattagctttagactaattctttactgtgtccacacctgctgttttataaatattgtatgtaactatcaagtatatcaatctaatagtctcattatagttactgaagaaataaaatatattacataatgagcatgtactttcttacaattgctgaatgacaaaagggatctggtgaattaagtactcgagttttaatggttttgaattagcctttcatgactaaaaaggtaggaaaacactattaaattgaaatacgttaatgggtttattagagaaacttagttcattcatattcttttaaaaccatataaaaactagcagtaggccaggcaaggtggctcacgcctgtaatcctagcactttgggaggccaagacgggtggatcacctgaagtcaggagttcaagaccagcttggccaacatggtgaaaccccatctctactaaaaatacaaaaattagccgggtgtggtggtgtgtgcctataatcacagctacttgagaggctgaagcaggagaatcctgcttgaaccctggaggcagaggttgcagtgagccgataatcacaccattgcactctgggcgacgagagtaaaactccatctcaaaacaaaaaaacacacagaaaaaactagcattagctatcatattttctctttaaacaaacattgaacatacagccatttagcatctttactttttcctgtattttttttttaaatagctgtagaaattatttttgcttaaggcttagaagagaaattgtgtattttgctccttgttttccagtggcttctaaaacatggcctaaattttagaaggtggcaaggtgtgaaaggttttcttaggtacattaatttctacatatatttgattcttatatttatatagccttttaattcattttaggtttttacatacagacaggcttttagcctcacaactgttgtctgtgccagctgtatggtactttgagctacagctctttcttagacagttcatcctgttgcatggtgttacttctaagataaggagaactgggtgcaatttgtataagcaaaagtatcaaccagcatattctacttaggaacagtagatactagtaccagaccttagtttttaattgacaattgactctcaggctattagttactgtgtttatagggaaattttaatgttttacaactaaacaagaagtagattcaaaattcattaccaagtagcttcttcttaactctcttgaagtctttctgcctcctgaaaattattttaatataaaagactttacagtaattagaaggtattcattcttatatggtgggatatctgaaataggagcatgtcttctaattcctgttcaccacttacattggtacaracagacagaactatgccccagtgatttaatctatacttactacgtatactgcttctgtctcacagatggaattactatgaacaaaatgcaatgttttgtggtcctttgaaagatgatttattttattgaatttactatttctagtatatttcaataaggcttttttttcgtgctttttaccctttaaagtaggaagttaacttttttcattaattgtgttacagggttggctagtggatcttctcaacaaatttggcactttaaatgggttccagattttgcatgatcgttttattaatggatcagcattaaacgttcaaataattgcagcccttattaagtaagttacatttaaaaatcaatggttagtgcaccgtagaattgctggtttttgcttcataaaaattgagtttttcaagtgtggtttcttcaactaataactgggattttttaaaagtaatataaagaatttagtcctaaattgattttaagaaattgcgtatttacaggagttttgtatctttcttatttcagaccatttgggcaatgctatgagtttctcactcttcatacagtgaaaaagtactttcttccaataatagaaatggttccacagtttttagaaaacttaactgatgaagaactgaaaaaagaagcaaagaatgaagccaaaaatgatgctctttcaatgattattaaatctttgaagaatttagcttcaagggttccaggacaagaagaaactgttaaaaacttagaaatatttaggttaaaaatgatacttaggtaagatacttacctcttgaaataattgttaatgccgattttagaatcatacttatcactgaatttttcttacagattattgcaaatttcttctttcaatggaaagatgaatgcactgaatgaagttaataaggtgatatctagtgtatcatactatactcatcgacatggtaatcctgaggaggaagagtggctcacagctgaacgaatggcagtgagtctttcagttcttcttcataggaataagaatctacttaagacaagaaattagaatagctctagctaaaaaaattagtaatagtaacattttaaagtaaactgaaattgggaggtgttttgattgatttataactctgttaatcctgagaactttttgaaataacatagtttattatttggtagtgatrtgggtagctttaaaacatctttgataaacttagtgatgaatgtggcgttttgaagtaattattagtttgttggagagtgggaagttggttgaaatggagtaggtagagttgatctagaaaatggattgggtagtatctagtaccttataaagtggcctattgttcatttgmccatttacagttaaacgttttaaaacaggaaataaaattactagaataagatctatacaaattgttttatcacgattttgagaattttattttgaaagcccttattttgacattgaaattttatgaaactttatgtaccatagctattttgtattatattgttttgaaatgagtaagtatgccatttaagttacagtgccaatattttttgaatgtatatgtgtaacagtcctggggaaacatctgtaggagaactgtccttgccctcaaggagccctcacttaataggggagttagtgattagagtatgttaaaatgcatgtggagactgcttagatattgccctgtgttagggggtcaggtggtagacatctggtttcatacatatgatgtacgtatctgcctcatggaaagtccagcacagagctattcaaagtgtgctctgaagactggtgctggttcttgaaccagtcctagataggacagagaatggcattaagtgtttagaaactttcattgcagtttgacattgcgacatttttattgtgttttacaaaattatctgtggctctgcagtggctcacgcatgtaatcccagcactttgggaggccgaggagagattgcttgaggccaggagtttaagaccagcctgggcaacaaagcgagaccctgtctccatattaaaaacatatgtgtatatatgtagaataacataaaaacaaatatctgcaacagattagacattaaaaactggctcattatcagctgagacatgtacttctctagcacattttgggcctaactactttttattctcagctaaatactgcaaaatcatatagtgtggattactccctgtttgtatcatgagttagcactttattctgttgctatagattaaatgaatgctagttgagcaagctagcacagtgttacagaaaaacagactgtggaagcatatgacttgattcatattccaattctagcatctgtgagcctgtttacattttgtaatagaataatgtatctcttactaggattgtttggaaaattaaagagataatggataagcaataatagtgcctagcacatgataattgttaataaataaaagtaaaaaatagagagcctttttacccaaggtcaaaacataattctgtggcaaaattgggataaagaatccaaagatcctaaaattggtcctgtactcaccctaccatggtgattgtgtacttaaataatatttttctgagtaaatgctggagtgtagaatcttcttaatttcagtattatttatgggagcatttctgtatgtgcaaaattgttataaaatttcataattttccattaaagcaacacataagtatattttaccagtattatattttgtaaatgtgttttgaatttccttatattatttaataatagtgtgagcaattaagaaaaaattgttttaatttctgctttcaaacacgtttttgaattaacatttaggaatggatacagcagaacaatatcttatccatagtgttgcgagatagtcttcatcagccacagtatgtagaaaagttagagaagattcttcgttttgtcatcaaagaaaaagctctgaccttacaggatcttgataatatctgggcagcacaggtaaggaatttaagatgatggctatttagtttttaaaataaagatactaaaaactgaagaaatacagtagctgtcatgaaatggatgcaggcttgtattgtttgactttgagaacgtttaaatgcttgttaccctgccaggaatcttyttgaaataaccaataatcttttaaaaataaaaatattcttttatctgtatttgataaaggttgagaatttgtcagtggttttaaataaagatgcaaacagtaaaatcataaggaatgtctattgaaagagagtaaagacatctgtaattggtttcttcatagatttaatagaaagcaaaaacctccagtgtcaggagaattaattcacttgattatttataaagacctgtaataattattccagagaatttataactcttcagaaggattagtaacctttttagtttttgagttggaaactacaactccttctattatcttaatgacagttttctaatcgtggatttcttgggaagcattattgagttgtagattataaagctttgtttttttagtctataaaaaccaagaaaacagctttgcctttgagtgcttaaggttccagttttgaaacaatattgttagtgtgccttatttttgtatttgcaatattaaaattgtcaaattaaataaattgtattaaaggtttgtatgaaccgccaaaatacacattagctgtatttattatatcatgaaattaagttgccaggttttagatggcagttctaaagcattttataatgttagaattttttttttttttttttgagatggagttttgttctgttgcccaggctggagtacagtggctcgataccggctcactgcaaccttggcctcctgggttcaagtgattctcctgcctcagcctcccgagtaggtgggattataggcatttgccactgtgcgggctgtgttaggaattttcttgtgttacatagttaaatgaaggagataggagtactttattaattgtcagcaagcagtatacactacttaatctattactcagattcttgtgcattgtgatttcgtttttgtttttcaataggcagggaaacatgaagccattgtgaagaatgtacatgatctcctggcaaaattggcatgggatttttctcctgaacaacttgatcatctttttgattgttttaaggtaattgttaacatagcaaaatattaccattctatttcaaatagaattgattaattagatctgtgaattacttttagccaataaatacttaaatagaaatcccattaaacagtctgtggtgtgaaggaattggcccattgttttcttttccaacaagaacttgatgttcattttcttaatagcccccataatggaaactcaggctatcactttttctttctttcccctggtagtttctattttagttacaggttcaagcaaattgtaggactacagggaaggatgattggctacaataaacagtaagatgaaagcaagagaataccaatatcttggtattctggggtcatatgtacaagcaaaatatgagttaatcaaaatgtaactgataaggtagcccaagaactcctcctacagtcatatctgcattgatgccatcatgttggtttttgaggccatgttttgtaacatctttgattagttgccagggttaggtttgtgaaagctcaagtggttagtgaatttgtggattaagaacgtaactttttggcagtttgcactaagaggtgttctgttaacaactggcattagatcaataggtcaccaacgtttcttgttaaaaataataattatactgaccagtgggaacataaattgctatagccactttggaaaatacttggtatttctggtaaagtttaagattctcataactcatcagtttgacttctgaatatacacttgagaaactcatgcttatgtacaccaggatacgtgttcagcaacacttgttagcagaattacttgtaatagtgaaaaaacctgctatgtaggatagataaaacatagaatagataaattatggaatgttcatacagtgcaatatttcacggcaatgaaagagcaactcaaccatatggatgagtctaataaacagaaggttgaagaaaggaataaagccacacagtaattaatacaccttgattacattaatgtaaagttccgaaatgggcacagctggtttctgggatgttacttgccgtgtattattttttacctgggtactagttacacaggtgttcacattgtgtactgtaataatggtatatgcttgtacttttctagatatttcacagtagaagaaaaaaataccatttttactggcttccatcacagacatgttagatcagtaggtactgaagcccaagagtctgtattttaagcaagtttcacagataagtcttagggacattaaagctttgatttatggaaaaatcgctgccttatggaaaattttattttgaagggaacaaattattgagtgaatcttttatgtggtttttatatattttgtttctatacatgtaaaagcaaaacttaaatactttttccatccattgaagtatatcaaaggcagctgaggaaataatagaattggtcatcatgggcactgcaaagataaagacttccgaaatgatgatacgtgaccagtgatgcctttgatgagagaaggaaaaaaaggggttgttattatatctgctgtatcccccctcttctcaggatagtctaaatacaataatggtctgaatataataataattcttcatgttcttccccctttggcttaacatatgtttattgagcacttgtcatttggtaacaagcactttttttccaaggtgttggtaaatctggcaattcttatggagtgttgaaagtttctgctaaagatgattttgaaaggaagcaatgaagtctgagtcaccttgtggttctttgcagattgcaaccaaatgattccaaccttctgggttagactttgctttatgtacttggcctagagcctagtttttaaacatttgagttctaagtaagtttcatatctttgccagcacttgttcttgtcagagttctgaatttttgacaatcttcttggtgtttgaaatgttacctcattgtgcttgtgcttttagtttttatatcccttgatcaataatgagattgagtatctttctgtatattttttgagctatttgcctttttttttttttttttttkggtgaatgcctgttccccccctccccccaccgtggcattatttgtatattttttggattgtagttcttgatatattttgaatgctaatcyttgtcagttcaagagttacaaataatttctcccaatttggttatctttttcattcacttaatggttgtactggttgaatagatgttcttaatttctccttttcatgtagtttgtatgtctaaaagatgagtacatgaaaaaattcacgataccattatctacctaaaaaacaataattccttaatatcataaaatagttttaaaacttccagttgtcttagatcatacatcttcattttagaagtgagttttaatcaggatcctggtgcagtccatgtgtatgtcttttaagtctctttgaaactagctttcttcttttttacttcccttgcaatttatttgttgaagaaactggattgtttgttgccttggtgtctgtcaatagttttgatacagaaggttttttttttttttaattttactagagcatatctcaagtggtggtgtgcttttccttgaggaggaatacctagttgtctctctttttataatgttagctagaggtttttaattgtaatctgatattttagtcttacatttttagcagttgtcatattccttttgttattttgtgtaggctggaaggaaataaaaacaggcattcacatcatctttgaagacgtaccatattaataattccattgaactaatcttctctcattaacttaatcgttgttttttttttttttttttttggagacagagtctcactctgtcacccagactggagtgcagtggcgcgatcccagctcactgcatcctccacttcctggattcaagcaattctcctgcctcagcctcccaagtagctgggattacaggcatgcgccaccacgcccagctaattttgtatatttagtagagatggggtttcaccatgttagccaggctgatcttgaactcccgacctcaggtaatctacctgcctgggtctcccaaagtgctgggattataggcgtgagccaccgtgcccggtcagcttaatcgttcttctgctgtttgacgttaagttcgtttcagtttattttctaataaacactgatcagcaacttagtgcatttgctgctgctataacagaacaccacagactgggtaatttataaagaacagaattttatttggcttatgrttctggaggttgggaagtacaagaggcatggtgccagcttaaccgtgagttttgggggggacattcgaaccatagcagtaactttactcataaaacttttcccatattgcttagcagcatccctggtctctactcactaaatgccattagtaccctrcccttccccaagcatgataaccatgttgtattacaataccattttagaggttttaaaaaaatgtattttagagtttttaattgggtgtcttctaaattgaaatagtgtatcatttatttttcttttttggaatttaactctaccctataaaaaaaataccaggctaactatattttcagatctcacttgaatcattctgtgcttagctacgttgcttttgatgaatttgaatatagttaacctggtgacaatttatgaagtggtgactaaatatgtgttgttttcatgtcacttaatttttttctaggccagttggacaaatgcgagtaaaaagcaacgtgaaaagctacttgagctgatacgtcgtcttgcagaagatgataaagatggtgtgatggcacacaragtgttgaaccttctgtggaatctggctcacagtgatgatgtgcctgtagatatcatggacctggctctcagtgcccacataaaaatactagattacagttgctcccaggtaagagtgtactgctttgctcactttttgtgacttttccccttcagttaggttggcttagttacaggatagttctgttactctgacattgttagtttttaaatgatcttcnggagttgacttyttttgttcattagtctgctttccttaggatctgtacatcaaggttttgtgactcatctgaaaagcattttagtctccttgggagaaagtataaacagaacagattatacagtggtggcattatcaagtgtatggttctgaaatgccgtttcgaatagaattcgaatgttaaagctgatagggacttcagagggaagagaaattaggttttctttgctcatagggaagttaagaaaaattaatagaatttcctaaccattaaaacatttagtgcctccacagtgagcaaatcacacagtttccctacattctaatttgtggcatgtgtattttttaacacatggtaaagtgaacattgctgagtaatttctcacatgttaataaaactatttgttacactgatgaactggtatttaggtaagagccaagaaaagctcaggaaggtgtattaatgtagatactactcaggttttgactatgtttacttgtgacagttcggtaagtatttattcagcaaattaaatagtaataagggccttgagtataaattatttcattaaaccaagggtccttctgaggagtcttgaaatcagagcagtacatttgctatcagggcttttaactagtaacttcttttttaaatatctattagtatcagtgcctggcatagtgatgtacacattcattcatgaatagttactgagtttcactgaatttagtagactgttgccttttttcaacttcaactttcatttattgtttgggaaaaaatttttaaaagtcattttccaactgtcaccttttcccttctrcttgccaaaactgttgtcaaagtgtacatttgatcataaatgttttcatggccttaaaaatgtacacactattaaacccaacaattctacttagagaaatttcttctcggaaatagtgaaaaaggatacaaagaggtacccacaaggacattcattagtgtttatggacatgaacatgtggaagcctcctgaataattactttttttttttgagacggagtcttgttctgtcgcccaggctggagtacagtggcgcaatctcggctcactgcaacctccgcctcccaggttcaagcgattctcctgcctcggcctccccagtagctgggattacagacacgtgccaccacacccagctaattgttttgtacttttagtagagactgggtttcaccatgttggccaggctggtctcgaactcctgacctcaagtgatccacccgcctcggcctcccaaagtggtgggattacaggcatgagccacagctcccagctgtgaataattactaatagtttatacaaggttcgattatggcgccattaaaaggattaatatcacttaagagtatgattctaattttgctgccgaaaaaggaatatctgtgtattacaaaataaccccaaacttgaggggtttcaggaaaaaaaaaaaacaaaaaactccacaaaattgttttcctttccctgtacgcaaaagtaaaacaatccgagcttacgaaattgttaggcacacaaacttgcagttctgattactattgactttaggggaagaggtgaagtaactgaggtttgagaagtaaaataccataattgaaataattttgagtttataacatttttaatttttaagtttatatctgcctctgtcctttttctctccttgtacgtgtgtttctttattttgattttggygattatttttaaatgtagttgtcattctatttattttcttagtcaaatatacattttttgtgttcttcactgtactaaaagatggcccatttagagtaagtcagggtcttgttatatattaattctggattttatgatacggtagaatctcttaaaatactggctaaatacctaccctctggcaaacttggaaaatgaaactttctgtcagtgtgcctaatacttaggatctgtagtgtgtacagatatatttcagtccatataatacaaagcttttataacagtgctgggctttttggagttctggtagtaagtgtgaaataaaaacaaacttaaagcttttattatttaaattaaactmtytactgtaattacaacatgatgcttgtattgctaatcttaaaagaaaagcttttattttataattctcaaaataatttgaaaataaaattctcctgagtattgatctatttaaaacattgaaatcatttgtttaaggaccgtgatacacaaaagatccaatggatagatcgctttatagaagaacttcgcacaaatgacaaatgggttattcccgcactgaaacaaattagagaaatttgtagtttgtttggtgaagcgcctcaaaatttgaggtaagactttttaacatagaaaatttcaatacttaaaatttatgtactttattgaaaagaaacagcatattggctggcaaatgcaaatttttaaattagtggagtgagaagaggctatataagaagtgtttggaacaaaagaattctttattacatctacctccttttttttattaatgaggaagtaagccacagttaagtgataaatcagaatcaaggtaatattgcctttgggttcttggttcagaattattattatatacatactatatttccagcaagtatgccaagaagtttcatagcatgtctttaaagatggattagaccacaagaacatttaaattgatgaaacatgacaagataaagtttcataatttttaaacatttattttagctaaatttctttttaatagctgtctttatactatcttaggtgtcatattctggttactgaaataatttgtcctattttctggtaatacagttggaactgataacatgaaaaggaaaaataatgtgaagagaaagagagcagggtgcagtagaaggaatattcacagtggagtcaggattcctaggtgtgaatcttgtgtcaaaccagtaatttaatcttgtaaaaattctgtaaagaatcatgtttggcctggtgcggtggctcacgcctataatcccagaactttgggaggccgaggagggcggatcacctgaggccaggagttcgagaccagcctggccaacatggcgaaaccccgtctctactgaaaatacaaaaattagccgggcgtggtggcatgcgcctgtagtcccagttactcgggaagctgaggcactagaatcgcttgagcccgggaggcagaggttgcggtgagctgagattgcagcactgcattccagcttgagcaacagagtgagactgtctcaaaacaaaaacaaaacaaaaccaaaaaacatgttttctttatatgtaagattaaatgattgccaggatcctttacagctctagattactatgattatacctcagacagaaatagaaaaggtcatgtatatgtctttatttaaacagttgaactttgtctcacttttttccctaaggctagaaaaaattagcaaattggaaaagctatagagataaacactgtaagaaattgagacatatatctcgttaacaataatatttgaggagcatattttgagtatgtttggctcatcgtacatatttcggcctttctcaaatgaatgcatttatctttcgaagtagacacagtagttcacatactctcccaagaacagtggccttgtctcccctaaaatagtagtagtggatgtgaaagttgattggtttcagtgaaggtagcaaaacagattagggtttcaatgaagatagcaaaacagatgagtctttgtggtgacacctgtgggcaaacttggctacaaacagagtgtcccaggatgttttcttaaatagctaataagaagaaaatgctaagagcattttctttgattgaattcttccttacaactgtagcataatctttgtgatgctagtcttgcaaaaaatgtttctattttataattttgggaataattacataacataagtgctttggtacagttatagtatagacattagtcattgaggtatactcccatttggtgaagttggagaatagtgatggatgctttttgtgtaaaataataatgtaataaatgtcttatcttttgaagagtttaagttggttgtgatattttcattaaaagaagtaaatgtacaaaagtataatttttaantttttacatcagtagctaagaatttagatagtacgaactcttctggttrcaacagagtttaattgcctaattatattgttaagttcttctcgtttcagtcaaactcagcgaagtccccatgtgttttatcgccatgacttaatcaatcaacttcaacacaatcatgccctagttactttggtagcagaaaaccttgcaacttacatggaaagcatgagactatatgctagaggtatgtattgtaagctaaaataaactatgggaaatagcagggacctttttttgcattaattaccttagaaatgtaaatcatgttcctttatggatttaagatccactattactcccaactcttagacatcctaaactctaggccagcagtttaagagtcttcactaagtgcttgccttcccccattctctttgttaaatagatttttgttctctgctttgggagctctgcctgccttttttacgattgatcgctaccttcttaggaatgtacttggctcmttttcaacctttatgtcctttaccaccacctttagctttttaaaaggaaacttgttttgkctaagtctgttcttactttatagttcttttataatgccaagcctatgttttgtaagtgcttcaagactccatgaatttaaaaaacataagagtagagatgagaggctggctgtaagaatctagatgtttacattggcattcaaagtgtgaaattgtttgaacatgtttaggataaagtttcctgtgatttcaacagatcctgattgtaagtcttagcctgccatgtgtggagccctgtgtcagtgctcttttgccctttgacagttatgtcagtctgtgtgtgcaagagtagggatggcttctcagtatatactgttcctcttctgtcttatgacaaattcatacccctttccccactgatactttgttgtttcaagtttgtttcccgagcagtatgtaagaaaatactgtattacgaatgttagttatagagttaaacatactgattactcaacttaccattcatttaacatgttatgtaggatctgcagaagcccatagtgtatgttaaaaatgagaatatttataatactcattatttgaggagtaggcttttgacattattgaataaaatcccctcgtgcttaagaattaccagatttttgcttaatacttatgtacatttcccaatgaaattcagataaacataaaaattaagtaactcttctgatactcccagtgatagtgttgactctttattcttccatttatcccctcggggccaatagattgttagagctagacaagcaatctaaatgttaggcagctgatgagsaacagacagtgatcttagcattttagtcttaggttccttctaagcagtgtaatagaatgatcaaggcaatacaaccatgtgatttatgttctataccaaaggtactcaaaatcagtgacataaaaaagaggtttatgtgtagtatacccaagcatttgggtttagtatattatgattataatctcttcctggtggtacacagccctcatggttgccaaggagggccttcccccagagtggagacatataattcataygtgctttaatgctaatttttatttacttcatttgcatgtggtgtttaatttcattgtcagaggtcaggaacccggctgtctcactagggttttttctgctacattttagtacaattctacttgagttaccgcctcatctcaacttcgttatcacaggaatgattacattcttcagtttttcctccttatgttgtctgtatatctgcaaactgagagatgtgagtctgcatagttgcctaggtctgaaacatgacccaaacatattagctgtatgactgtgggcaggttatttatgctakaataatgtctggcacatagtaaattcccctctgaattttaacatcatacctttttttcctcctaaccttggtaccttttcttcttccaatttattacactactcttgattaatactgatgagtctggagatagttaaatatgggggtgggggcaaataatttttaaaaccagtaaaattcttctattaaactttttacaacgttaaatcacttctgtggtaacatccactaacatttctaaatttgcaattctaaagttaattatggtttttgcctctataataaaagtgatagacaaatcccattagctatgaggcattaggttacttggcatgataacatcaggctttcacagtttactgatattctcaatttctgataaccattttaccaatggtttgtgctgcctgtattttatcttcactagcatctttagcttttgggggaaaaacatttcctcagtaagcatgatcagctgattttacctcctataaacattatttagataaaagaatgaacttagtaaaattctctacagtatttactcatgttctcactacaagtgttttcatacactggtacttaaattattctttaaaagtttttcatatgcatacaatgaagtataaaccaccttttagttttcactcaagttttaactcattggtagaatagtcattctactgacttcaatacttaccgaaagtttaatttaccattttttcttgtttctggatagagttggatgacccaacttcactgtaggtcagatttttccactctgtttacttaggatgctaccttctgttacttcttcccggtcttttccatccaacagtaacagtttttaggaacgttttccacacaaaaagattgctttatgagtgtcattcaccaacagtgctatgttagggtgcagatcctgtgctagattttctcaggactcattccttacatcaactatgaagtactattaagtctgtgtgacttctctgtggtttaaaaataattacatactatccattttgtgaacaatttgtaccttcttggagaaacggctgtttccaggcgtggaacagggaaagtaccacatgatccttgaccatcctattccagaaagtaagaaagtgctcaacgatcatgttgacatgtcaaaaggacacaggagttggctttcactggccataattaggtcaaaattagtaatgaaaataaaatatgaaaatactcatgtagacaaaaatgccaactaacaaatgaagagtatatgatgaaaataaacccaagggggtgaggattttcacgtctggaatggcagaataaaatgttcagcagaccttaacaaaacaaccatttaaccggagaaaaatataaacaatagtcatttagagtacctgaaaattgtcctaagagggagtatagcaaatgggaaaacactcaagaaaatctattaaatctgcaaaacagcaagagtctgtagcatttgagccacagcttgttctgttctcccatgttcagatccagctttcttgtgtggaaactctactccaggcaggtgtgactaagaagcaggggctccttccctgaggctgccagtctagggctgtagtttgaccacatgaggtggtgtgggctactggcatttctgatccttttcagtcgtatgtggcagaagctctgttccaggcagtcatgtccaagaaaactgagactcccttaccccattcagtgcctgcttgtaggataaatgctttacttaaggcatggcaggctgagaatattgggctctgattatccccaacctggcttgctcacagggtggacattatatgtcagggagtgcaatctgaaaaaatcagagtttgatcccacacacccaacaccagcacctgctcttaaggcagggatataattttgggagaagttagctgctgtcctccctctatctcctgaacagtaacatagatgttctgtccagatggagagagaaggtgtgaggatgctgtgctcagcagttgtgcttgaagggaccaactttctttggaccagaccgtgctgtgcctaagggtattatcacaaatggagatttgggtgatgaagaattaggagagtgcttgtggctcccttatactggtatcagcaagtcacaggatgagcaaccagaaatttaacagaaagatctagataaagagatggccaagacaagctctcttgtgatcacagtcaaccctgggggtcaggaatgctacgtgtatgcattaggcttcacctaagcagaaacaatcagaactggacacgggacaaattgaaaacattccccaagcttcatgtcaatccgtcagcaaagggtgaaagcctcaccagtacagtggacttaaatacagctctgaccaaacaaagcattgggtgaataataagctaccccgactcaggggcaactcttaggaagccagacatgaaaattacatgtatccctggcagtctggaagacttgstgcatccttgctggagtgattgagaagggaacaagcaagctgctagtctccgaatgagcataggacaaaaacataaactttctgagtggtgtgatagcagcctccaagccacacagacakgcagtggtaaagggtaaaaatctactagtcaaggaggcttaaacacagcgtttggccaataaggggcttatactgatgcaggggcaactcctaggtaggcaggctaaaggattaaaagaaggaggaaaacatgggggcagagctgtcggaagctgtgcactgtgagggaaatagactatgaagtctatttcccagtcactatatcccatagccatagcccttatttcccatagtcatatttctgtttcccatagtcatagcccagtcactaaacaagcaagcaaacgggtgggggaagggagatcagtattcaggttgttgttgcatatctaacatgtccagattttgatgacaaaaattgaggcatgcaaacaaatgggaagatgggacctgtagactgacgcagagactgcctttgaaggaggccaaatggagggctttgcagacagacttgacagcaaagacttgaattacaaatatgctcatagaactgaagaaaaccatgtctaaagaatttttaaagtatgatgacaatgtctaatctaaattagaggatagtaaagagaaattattttttatttaaaaaatcatgtagagattttgtacttgaaaagtataataaccaaaatgaaatattcataagaggggctaaacaatagatttgagctggcagaagaatgaatcagtgaacctgaagatagattagtagaaattatgcaatctgaagaacacaggaaaagtgaacagaatctcagggaaatattgggtaccatgaaggggaccaacattaattttaatgggaataccagatgaatgagagtgacagaaagagacatagtcactgaaaacgtctctaatttgatggcagacaagaagcttaaaaaagaattgcaaatagggtaaatgcaaagagccccagactgagacacattatagtcagagagaacaattggaaggtggtgagagaaaaacgagtcttcctgcacaaggaaaccccaataaaaattaaccgctgacttctcatcagaaacattgaggccagaaggcagtaggacaacatattcaaagtgctggggttgggggacagacatgacaaccaagaattttacattcagcagcacagtctttaaaatctgaaggcaagctgaagatattcccagataaacaaagactgagagaatttgttgctctaagacttggcttacaagacaccctaaaggaagtaattaggcccaaaacaagtgacatcagacagagtgttccgaatttgcaggaaaaaaatacttgaatactataaaccagcagtccccaacctttttggcactagggactggttttgtggaagacagtttttccacggactggggggtggggggctcacctcctgctgtgcagccccgtttctaacaggccacagacctgacagacatctgtggaatactccatccaacaatagtgaaactactaaaagcacatatcatcttaatagatgcagaaaaagcatttgtccaatccagcctcttttcaatatagaaaggctcaaactaggaatagaagggaacttcctctacctgatcaagactgtcccaaaaaacccacagctaacctcatactaattaatggtaaaaaactggttgctttccccctaggaacaagaatgagacaaagatgtccactccaaccacttctatttaacattctgcttgaggcattagccaggataactaggcaagaaaaagaagtagacaacccaattaagaaatggatgcaaaggatctgaatagaaatttctgcaaagaaggcatacaaatggccaatgagcacttgaaaagatgcttagtattattagttattaggggaatgaaaatcagaaccacagtgagataatgctacttcatacctactagggtgacaaaaaagacaacagtaaatgttgatgaggctatggagaaattggagcattcatatagtccttgtgggattgtagagtggcacccaccttgcaaaatattaatcgtagaatttaccatattacccattcccagttacatacccaagtaaaatgtatacataaatctgtacaacatgaatgaactttgaaaacattatgctaagtgggaaaaagtctgtcagaaaaataccacatattgcatgattcttttttttttttctttttttttgagatgaagtcttgctctgtcgcccaggctggagtgcagtggcgccagctcggcacactgcaacctccgcgtcctgggttcaagtgattatcatgcctcaacctcccgagtacctgggattacaggcacatgccgccattcccggctaattttttttttgtagaaacggtttcgccatgttggccaggctggtctcaaactcctgccctcagatgatcagccctcctcagcctcccaaagtgctggaattacaggcatgagccactgtgctcagccatgattccatttttatatgaaatgcctcagacttaagcagggagaacaaagggagagggtggtttgtacagggtttcttcttggggtgaggaaaaatgtagacttagattgtgatgatgattayacaactgtactaaaaaaattgaattgtatttaaatggatagattttatggtactttatgactcgatgttttttttttaaatgaacttttaaaataagttctaaaatgggccctagaaaacttgctgtttatgatgacaagaaccaatttatgttagtctcagccatgattcactacctcttcctacctattttcatagacatctgagtaatttagtctcatctaattcttcctgctgttttcagcgggatatttgccacctagacaatatgagtcaaaagtggattatcctcctcatttgactgctagctaacaagtccaggtatttgttttgaactgaatatttactactaaactaccaatttatatatatacatatatatatatataaatttgtcttgacagcttggaagcttctctgtagtaagagggcctcttcattcctatttagcataaaggcatcttatttcttgacttttattgattagctgtcagctgaatgtttccaaagttctactctttgtgcagggtcccagttcttcataagtaaagtgttagcacctaaacaaaaaaagggaggtgggttgttagctaaaactagtgggcaaaagtttaacaaaatagttacatagcctcaaagtctctctctacaaattacttattaattacaaagagcaaaatagtacctttacatcagagaaacctgcctcccttctgtgttactcgccacaatgcttagactgatctaattatgacgaagtggcatggaagcccaaattgagtgacatttcaacaaaattgacctccagttttcaaaaaggtcaaagaacacaaaggatgattaattctgcagattaaagaatagaaagtcatgaaaaccaaatgcaatgtatatttaatcttgggctttgtagaaaagatgtaaaaggacgttattgggaaaattgatgaactcgaatatggaccatggattaaatcagtgctcctccgagggggtggaggtggctatttgacagtgtctggagctgtcttaaactggggttgaggggtgggtagaagcctggaatgttactaagtaacctatagtgcagtcctagacagaacagtcctgtacaacgaagattacctggccaaacgtcartaacggaaaccctgggttagatgatggtagtattttactagtgtagttttcttgttatttggaaatactcattgaagtatttaagggtaaaaggacatatgtccaactcttaaatggtttataaagattatgcacacacgtgtatgtgtgtattttttacatgtgtggcaactaatgaagcaaatggaggaagatgtaaacaattggtgaatacaggtaaagagtataagagaattcttgcctttttttttttttttttttttttttttggtgacggagtctcgttctgttacccaggctggagtgtagtggcacaatcttggctcactgcaacgtccacctcccgagttcaagcaattctcttgcctcagcctccagagtagctgggattacaggcgcctgccaccatgcctaatttttgtatttttagtagagacggggtttcaccatgttggccaagctggtctcgaactcctgacctcaggtaatccgcctgccttgccatcccaaagtgctaggattacaggcgtgagccatggcgccctgcctttttttttttttttttttttttaaagagacaaggtcttgatgttgcccaggctggagtacagtggtgcaatcatagctcactacagccttgaactcctgggctcaaaccatcctctcacttttttttttttgagacagggtcttgctatgttccccaggctggtctcgaactcctggcctgaagcaatactactgcctgggttgggcttcccaaattgctgggattacaggcatgagctaaaacttgattttctttccagtttcttaaraaaacctcttgaagtagtcctttaagtcccaatctctgatgaaatatgcattcctgaaagtagagtgtttatgcctgtttgcatattccratatatgtggaattagaaagtagtttggtcgtaatatatggggcttttttctttaccaaagcatcaaaaccaaatatgtttccagacattatgaatgtcccatctttataacacatcaggagtttgttcagagaagaaacatcaatgttttgaagaatttgattactgatttccaaaagagcttacataattagaatctttaacaatagcttgcacataccatagggtctgggatctgatatggaaatatagtaattaatgctgaaggaaaatgacacattctggacattaacatggtaatggtgacaattgtatgataacttggtcatgtagagtagcatcttgtgttaccctcacttcttaggtgtaaattagtaatatttatttttataccaaaataattttttcttcatgaaaacacctttcaatataacaggtaagaaattgaagaaaaaaattttgtcttccttatcagttcatagaccacttaggtcagtcttaggctgcaatcatgaattgcttcattgtgtgtgaaggttgcacgaaggggttgtgctgaataattatttttgatagcatatttaacagattattttgttttggttatgtaacaggaacgtatttttgtggggaaaacaggagatggatagaaaccaccaactggtagaatttaggttgccttttaatgataaaggattagtgacattttaactggcctaatttctttggttgaagtcaaagcagtgatttgggttatccatgtgtataatgcatggttttttcttaatttgcagaccatgaagattatgacccacaaactgtgaggctgggaagtagatatagtcatgttcaagaagttcaagaacggcttaacttccttaggtttgttttatacagttagtgttgctctctttaagaaaaagataaggaatacagaatgaatagactgtatagcttggtctttgttgggtggccttttcccaagtccccaagtcatgtaagacatttccctgtatttgttactaaatactttaaaatgattcgctgagttttaactttgttgcaatattttaagagaacacattttaacctttagaattgacttcgttcttcatatctgtttatgctggaaataatgtttatttttaaagggcaaattcccatattttgacacaaccggaaggaggactatactgacttaatgatatcatagacactaaggaaacgggggcaaaaggctgctagaccagcacctcaaaagagtggttggagtcctctggtatcttgtttattctaacagtggctgacaggcaatctaaagtcatgtgttaataatatcatttctgattggcttgaggggaaaaggtttattaagataaaatgtagtctagggctggattttctctgcaatatttagcgtttggtgatcatacacttaacagatgtgcaaagtgcctttgttaaaaattttgatggtcaggcacggtggctcacacctgtaatcccaacacttggggaggccaaggcaagtggatggtttgagcccaggagttcaagaccagcctgggcagcatggcgaaatcccatctctaaaaaaaaatacaaaaatcagccaggcatggtggtgttcacctgtagtcccgggtactcgggaggctggggtgggaggatcacttcaacctcggaggcggaggttgcagtgagctgtgattgcaccactgcactccagaccctgtctcaaaaaaaaaaaaaaaattttttttttaaatgagaggttccttttgaattcaaaaaaccacatgtagcaaaagagcttgtttagattacaagtgtgctaacagaaatgcccagattatcactgcttcttgaagtctattttatttatttatcttatttttttgagacggagtctcactctgtcgccaggctgaagtgcagtggtgagatctcagctcactgcaacctccacctcccaggtacaattctcctgcctcagcctcccaagtaactgggactacaggcatgcgccaccacgcccagctaatttttgtgtttttagaagagacggggtttcaccatgttggccaggatggtctctatctcttgacctcgtgatctgcccgcctcggtcccccaaagtgctggtattaaggtgtaagccaccgtgcctggccccatttattttaataacatattctgggtagttttgtcctgggctgtgttaattatggatttctatttattgaactctgtgcttatttatggagaaaattttaagtagctatataatgattttgaggaaaaacctctaccaaattttaagaaatttggcatttgtttaaagtgcattgtttttttttttcctgtgtgttttgtttttaaccacctggatagaaggacttgcctcctccccacattgagagttactgccatagtaagcagtcgttactgattggcatgtgttatatgtctcttaggtttactagaacagaaaagtggtttcaagcctttttgccattttaaagtttggaatcagaggaactattgtagtttctactctgttagtacctctgtatgtgagctaatagcaactaactcaaggaagaggaacctgactttaatgcctgctgtgtgttgggcctgtgccagacactttatatttactccgaagcaacacagtgcagcaggtgttactcccatctgatcagtaagaaacccaagattccaatggcttaaggtagcttgtttgaaataycacagccagtatacgatggaattgcactactcaactaggtctcttttacttaagtctgtgctcttcctattagaccggtagtttttcaaacttacgtaggagctttagggcttctgagttaagttccttgaagatttctgaacaagcagtaggaagtttcccgatttttcctttctttttcctctcccaacaactggtgcagctctactttttaaaatatatatcagattccaaatgggattttcatttgaagaagggtctatgccatctttagaaaaaaacaaaaaaatggaaaacctttgaaaakttaagcagttttaactcataaatattgatggattagttatttgtgaaagtcacttgattgaatacctcatttttcaatgatgccatataagcaggctgctaagtcttttttctggttgttgttgkgagacagggtctcacccaggattctctacttaaatatgactgttgttaattgagtgctacaattaaattagccattgccatctttaattggagtgcagcggcacagtcttggctcactgcaacctccgcctcccgggttcaattgattctcatgcctcagtttccccagtagctgggactacagacatgagccaccacacccggctaatttttatatttttagtcaagatggggttttgccatgttggccaggctggtcacaaactcctgacctcaggtgatccgcccacctcagcctcccaaagtgctggcattacaggcgtgagttactgtgcccagcctaagtcttttatttttaactcaagctactaaacatgcttctttccaaaagtctggtttcaaaaactaaaggttcatggaatgaatcttttattcctaattcagctagctgcatttcaggcacaaagtgggtgttcagtgtgtgcttgttgaattaattaatatctagtggggatttttttttagtaccagataaaagtagagaaataggttattttgaaagaatgaatatctttttatctatagttaaaatataatggtgataaatgtattttataggtaatacagattgcctttccggataaaaattacataaatctaattgccaattttcaatgttttttcaagatttttattgaaggatggtcagctgtggctatgtgctcctcaggcaaaacaaatatggaaatgcttagctgagaatgcagtttacctttgtgatcgtgaagcctgttttaagtggtattccaagttgatgggggatgaaccagacttagatcctgatattaataaggacttctttgaaagtaatgtgcttcagcttgatccttctctgttaactgaaaatggaatgaagtgttttgagcgattcttcaaagctgtgaattgtcgagaaggaaaactagtagcaaaaaggagagcctatatgatggatgacttggagttaataggattagattacctttggagggtaagtcaaaagtaggaactctgtaaatggtgtctgatgtactttttcatgtacgtaaggaattgtaattttgcatataaattgtgtattttactctgatgtttgtctcaggaatttggtgtagttaggaattgttcatttttattatgtcacctgtcagtgggctttttcttctctcttcctctccctcctcctgccactgatgttccttttgtcttagcttagtatctgtgtattccatagatgtgcactaaacatacaaatctttcattcctcccccgtggatattaatgttccttcccgagttttcattcagtgtcgatctgtttcctcctcttcaatgtttaacactaaaatagaggacagaagagaggacttgtgtttagtatagattatgagtatatgctttattggcactgtttaccttgtgatatttttaaatacctgggggaataaaatactatctttttaaggctaatctatttttatagtactactctattatgcctatctttaatctgacctgttatacagcagtttatattgtttggatgtctcacatattttcctgcaaaccatagataaagatgtttattgtggcatttgagtatttaaaagcttttaattaagtatgtggttttcaacattgttttaacagcagaaacacatcttaaaactcaaaatttgcaccacactacaaaagtaaactgaattgaacaaggaaaatatgttttcttacttggtctccccatgcttatcccctttcccctccccaacccttttataggggccaacactgaaacacttcctcaaagtcccctagggttctgaacatagtttggaaaccactaatgtaattagatgagtgataaagatttatagaaactgggggtagagtagtcctttatgctaaactgtgtttcatgtaatctcttatttcctgtcaactaatttgaatttcttcttgagtgtctcacttggttatcaagatattaaattatagggttaaataatagtggtcaaagcgtattttatttttacaaaaatgtacctttcattcttaaattattcagagactttcattttgcatttattaccctttcttttggtctgtgcttctcacttaattttacttgattatcaaagtcaacttaccattaaatcattgaatagtgtgtttaagataactgaggatatggtttgaatttaaatgcccaacaaaaatatatgttgaaagggatgaatacttttatcattttgaaaccaggtcgtgattcagagtaatgatgatattgccagcagagctatagatctcctcaaagagatatacacgaaccttggtccaagactacaagtcaatcaggtgaggattgatgtgcattaaaacttccatatataattctttcggcccccatttctcttatacaaaagagaaaaaatattatctaaatgaatcttgccttgttagttgtcttgaagtgattgggttatttttaatataactatttattagatgttgaaatggcaaagaaagtctatgtgaattcattttgatgctaacacctaatcctgaagttcacttttgactaatttatgtttgttaacttatgtaatgctagcttccttttaataaacatacattttattattgtatggattctctacttaaatatgactgttgttaattgagtgctacaattaaatcagccattgccatctttaattggattaatatttggtttttacattttaaagcaattttaactgtgtttatttggcctgatatttgtaggtggtgatccatgaagacttcattcagtcttgttttgatcgtctgaaggcttcctatgacacattgtgtgttttggatggtgacaaagacagtgttaattgtgcaagacaggaagctgttcgaatggttcgagtattaactgttttaagggaatatataaatgaatgtgacagtgattatcatgaggaaagaacaattctccctatgtcgaggtttgtgaataactaatctattggtgctaattcttaattatttgatattttcctagccatttggtaaaaggagagcagaaatttttctcgtttgaaaattgttgtctttgcccattaaaaacattttcatttcatctaattttttttaataacctcccccactctcccatctggttttgttttggttttttgggtgaggcattcttaagttgttttctagttttctttttgtctttgacattattactcattaagtgttgcagtggcattttgcagttgaagtgtttttgtttatttgtttattttgagaaaaggtcttattctgtcacccaggctggaatgccgaggtgtaatcatggctcactgcgggctcaagcgacctttccacctcagcctcccaggtagctggggctacaggcacaggctaccacacctggctaattttttttgactttttgtggaggtggggtttcactacattgcccaggctggtttcaaactcctacgctcaagcaaatcctcctgctttggcctcccaaagtgctgggattataggcgtgagctacagtgcctggcctgtaaagagctcttaaaagctgccttgcatggcatataacaaatattttcaaatggtgtttatagttttgggatgttttgtgtagtcaatgccatcattttttttaaagagttttgtttattaatcatgaaattatatacagttgcttcttgaatatgatttttattttgtattttactttaaaaaaggtactataccaatataaatagcattttggagtgaattttgatatgaaggcttttttccagaaaaaaaataaagtgcattgtggcatttttgttgatgcttttaacaaaatgtaaaacgaccttttaaatgtaaaaggtaaactctaccttctttttttgaatttttttttttattaatacaaggtctacctatgttgtcgaggctggtcttgaactcctgggctcaagggatcttctttgcttggcctcccaaagtggtaggattacaggcatgagccactgcgtccagccaaccttttacatttaaaaatagtcttagtgagttgggcttttacagcataaaaataagcgttatatcttggatttaatttcattttagtagacacctcattttctgcaaccatagatacaagactaacaacaatagaatatgattatgtttttaaatattatttatatttttagttaaaaggagcaatatttttttttcttttgcatttcactcttgttgcccaggctggagtgcagtggtgcagtctcggatcactgcaacctttgcctcccaggttcaagcgattctccagcctcagcctcccaagtagctgggattacaggcgcccaccaccaagcctggcttattttctgtatttttagtagagatggagttttaccatgttggccaggctgatctygaactactgacctcaagtgatccacccgcctcggcctcccaaagtgctgggattataggcatgaggcaccatgcctggccttattttcaagatactgaaagtaatacaggttgagtatccctaatccaagaaatccaaaatttgtctggtcccagacatttcatataagggattctcaagctgtattaagtatctttaattcacatcctcttgtttaataagaaaatacttagtgttaaatccccagcattattttcttggcaacaaaatttcagagtctgctgaatatgatgatgtctgtctttctttttccccccagagcattccgcggtaaacacctctcttttgtagttcgatttccaaaccagggcagacaggttgatgacttggaggtatggtctcatacaaatgatacaattggttcagtacgacgatgtattctcaatcgtattaaagccaacgtagcccatacaaaaattgagctctttgtgggcggtgagctgatagatcctgcagatgatagaaagttgattggacaattaaacttaaaagataaatcggtatgtatgtatagttaacagatttttcaataaaatcaaaccagagactatcgtttaatcagtaaatactaattgagcatttgttatgtttgggactgtgttaggtgttagagttatagcattaaagtatagcatgtagtctttcggattttttggttggtatatcactaagttttgtgttttgtgtaagtatttttccttgtttttgatattaacatagtatataattttcagcttatyacagccaaacttacacagataagttccaatatgccttcaagccctgatagctcttctgattcctccactggatctcctggaaaccatggtaatcattacagtgatggtcccaatccagaagtggaaagctgtttgcctggagtggtgagtagatacagttttgaactactgtatgtaaggcatcatgctagggtttttgagaataaagtatatagagtggttctttcttttcttgaggagcttacagtttaatgagacaaaaaaatacagttaaccaccaacttcagaatggatccctctaaaaggtaattgtaacacagttggaatttaaaacataatttccccataggtatagtattgttacttttacataaaattaaccaattagagcttaattataacactattggatgtataaatttagaggaaaacagtcatccctcgtatacgtggagaattggttccaggacctctgcatatacccaaaatgctgcagatgaccctgtgcaaccagatatacaaaaagttagccttccatatacttgggttttgcttgctggaaatactgaattttctgtccacatttgattgggaaaaaagtctgcatgtaaatggacctgtgcagttcaaacttgtgttgttcaagagtcagctgtatcactttctaaaatttataccacaaaacggatagttcttttagaactatatatgagctgggcatggtggctcacacctgtaattccagctactggggaggctgtgaggcaggaggattgcttgagcccaggagttctaggctgcagtgagctgcgattgtgccattatgctctagcctggtcaacagagtgagaccccatctctaaaaatataaataaatgaaaacaagaactatgtaggaaaatacctgtaatctttatcagattgtcagtaacatatagccaaagaaatatttttaagctctcctttcgcccctcccgacagaaattttaatggttacaatagtagcagccactccagtgtcaggaggatttggctctctataacaactggattaagaatttggtagtgggcatggcagccttttgttatgtccagagtctaaattgtatatatgagagaaatggtttaatagaacaggagaggagctatcacaaaaaaatgactggaagtgactwgatgatgtatttgatctgcactattaaggatttgtagggattaaaagatgggaaagtcagactatttcaaagagtagaaatttcataagtaaaagtatagggattaacacagagaaacttacttgggcttttataaaacgggagtaaataatttagaggtaattattttgtgtattttatrttctagataatgtcactgcatcccagatacatctcttttctttggcaagttgcagacttaggtagcagcctaaatatgccaccccttagagatggagcaagagtacttatgaaacttatgccgccaggtaagaatttttaaatgatgatcaagtrcttgctggacaataaaggagtatattagcaaattctgtttctaaatggaccgtgctttttggtatagactataacaagagttgacagatgacagcccacaagccacatcaagccccctgcttgtttttgtgcatcccaagagctatatttttaagtggctacaaaaaaaaaatctagaakaataatattttgtgatacatgaaaattatatgaagtttaaattttagtgtccatgatcaaaaccaggctcatttgtttacattcagtctacatgactgcttttgtcttaaaatagcaccgcccaggagttgtggcagaggccatatggttcacaagcctaaactgcttaactttcctggccctttacagaaaatgtttgcctatacctggactataatatgggtcatgtgtcatctgcggtattgttccttttttatccttagaaacaaccacttccaacttctcgcttttactttagtatatatatgtaccattatgtctggagtgtcctcatacagctatttctttgttacttacagatatatactgattttctgctgtgtagatgaaaacttaactgttacatacccccacatcctcccagtatttgcttaaatccagattcaacatctacgtttccaagattgtttgaaatatagttctctagatcactgacaacttttatcctggatttaataatttcccttttattttcctgattgtacacctatcacttattcttcccacatacttttttttgagatattttttatctgaatgtgggcaractatcacgtttgattaatggtttgtgtatagaatcctaggtttgaaaatatattccttctggctggtggcattgctgatgagaagaccaaagtcctcttggtttctattcctttgcatgtgaccttcgtttctggaagttttggttttatccttacgttttgaaatattatgatgtgccttagcgttaagtctgttttgtggtgcgtcacctgtgggcctggagatttcctcagttgagagagatttgtattctttgatagttttctcaccagcattttgcgttttgtgtgtctttgaaatgtctaagtgtgatggtgaatttactagatctgattttaccttttctctcttcccttctctctttaatcttattccacctttggggtggcttctttaaccttttccagctcttctgttggcttttcccctccaaatattctagtgttaaaatttcaagacctttgtctccttagtgatccttttccatatacaggattttgtttttcactaacacattcttgcatttatgttctaatatatgtgtgttcctttaaaacctaatgttcggcaaaattatgcactaaaaatagtagggcttttggggaaaaagtagagttttggcagatcattcaagcctatacaacctaaaaattttttaaatgtattttttggaaatacttacaatcttacagaaaaattagaagtataattcaagaacacttgagagtaatttactggtttttgtagtcccatcgcccaccaaatactttccctacaaacaaggatatttgtctgtataagcaaaattaagccatctataccaggaaattaatgtcgattcattactgccatctacttagcagactctattgagtgttttcagttatctccttcacagcaaaaagatatagttcaaactcagatatagtcagccctccatatacatgggttctggatctatggattcaaccaactgtggattgaaaatgtttgggggaaaaaacattgttgaaagttccaaaaagcaaaacttgaatttgccacatgctgagtactgtgttgaatccacacgaatgaagctatgtgtaagcattgtattaggtgttacctaatacaatgtacagttaggcaccagataatgacgtttcagtcagtgatagaccacatatacaatggtggttctataaaattataataccatatttttactgtaccctttctatgtttaaatacacaaataccattgtgttataattgcctacagtattcagtacagtaacatgcttgtatgggtttatagcctaggagcaataggctataccatatataacctagatatgttgtaggctgtatcatccagatttgttgtaaacacaccctatgatgttcacacaatgatgaaatcacttaatgatgcatttctcagaacatatgcaacacgtgactgtaatctggagataatttatacaggaagatgtgcatcggttgtatacaaattccacatcattttatataaggtatttgagcatccctggattttggtgttgggagggtggatcctgaaaccatccctgcacccccaccccccatggataccggggaataactgtattgcatttagttaatgtatctctttagtttccttctgaaacagttcctcatactgtctttgaccttcatgaccttgactcttaaagattacaggccagttaattatagaatgtccttcagtttagatttgttttatcatgattgtattcaggttatgcgtctttggcagaaataccacagaagcgatgttctgttcttctcaatgcttccagtcagatagtatgtaatttcaatttttcccattactgacgatgatcactgtgatcacttgagttttttccttgcttccccactgtaaaattacccttccctttgaaagtattttgggccaggcacagtgactcatgcctatcatcccatcactttgggaggccgaggtgggcagatcgcttgaggccgggagttcgagaccagcctggccaacatggcataaccccgtctctactaaaaatacaaaaattagccgggcgtgttagtgtgcacctgtaatcccagctacttgggaggctgaggcttggacctgggaggcggaggttgcgttgagccgagatcatgccactgcactccagcctgggcgacagcgagattctgtctgaagaaaaaaaaaagtattttgtgcagaggtactttgaaaatatttatactgttcctcatcagacattttattcattcgtttatatctgtatgaaatcatgatcaaggagttataatctgttactatcatttatcttgatgctgaaatgatctcgtttggccagtgggagtcctttcagactgttctgtgttactttaatatgttcccattattctttcagcacttgtgtgctctttggctcaagatgtttaagattaggtcaagtgtagtggctcacgcctataatcctaacactttgtgagggtgaggcaggaggatcactggagctcaggattcatgaccagcctgggcaacatagccagacttcatttctattaaaaatttcaaaaattagccaggtgtggtgatgcgcacctgtagtcccagctacttgggaggctgaggtgggaggatcacttgagcctgggagatggagactgcattgagctatatgatcaagccactgtactccagcctgggcaacagaacaagacgctgtctcaaaaaaaaaaaaatttaaaaaagttccagattaacatcctgtaccctctctgccccagtcctgaaattggctgtttctccaaggaggcctgtttgatttattttcctggagaatggtgtttagaaaccaagatctggacatttattgcactcattgctatcgatgtattgttgctccctggctctctaagcagttagagctaaggaatgtgtgtatgtgtatccacatttaagtctattactatatatatacacacacacacatgaatatatatatgtgtgtaagtttttacaaaaccatggggtcacacgacttcctcccatcccagcctatcacagtttcattctagttttctccctttctatatttgtaattttttttttttttgagacagagtctcgccctgtcacccaggctggagtgcagtggcgcaatctcggcttactgcaacctccgcctccctggttcaagggattctcctgcctcagcctcccagtagctgggattacaggcgtgagccaccatgcctggccaaactctcttttctgacaatgaaaaacctggcttctgttatcctctcacttattttcctatttaatcagttatctccagaccccccaccctttctttgaacgcagaaggactcttgtctctgaatgttgggtctctaccccagggacactcctcgctctgcttgagttgaatctttatgctgagctctacccacttattgggctccctcctcctccttcatggtctgtaattcccaacataggactacctttaaaacttgcacatagtttaattagagcactcataaaatgataattagtatcctcagagataatttggacagtccaggcaggtacttcagtgtggctgaaggcttcctcaggagatagtaaaaagacacaaaaccagtacagaggaaatgctgacttgacattgctgagatacagtgcaaaagagtggagctctgagatagatgggctaccattaagataggcacagggggaagtagaacctgccaaggtccatgaaagtctagtttaggattgtatctcacaagatgagcccttgatgcaagtattcactttaaattttcctttaaaaagaaacaggcttctgcttacacatctacccagctgagggggctttttgctttgctcattttaatttttttgttgaagattaacagttctgttgttctggctactgttgcctggaagaaatcacacatgaacaaactcaccttctgcattatactgacatcattatatttgccaattgattgtgagctaattggggttatagaaacgtgctatagcataacagactgtaattatttctctctaggctattactgatggatattatgttttcttctttttccagcatcatcttttactgtccttgagttttttaactagctttttatattaaaataatttcaaactgtttacaaagaatacagttggctcccaaattcagtaattaacagtttgccgtagtgatggcaaaagtttcctaacatttggagaacaagttgtagacaatcatctttttcttcctaaatagcttagtatatgtcttctaaaaacaagaatgttctcacttacattaacatagtattattcaaaataaaaaaaatttagcatatacagtaatatcatctaatctgcagaccattttcatattttgacactttcctcagtattggactttataacaatgttttctggttgaggatctaaatccaggttcatacattgcataattattcggtatctctttcagttgtctttaatctggaatagttcctcagtctttgtcttttgtgactttgtttttgaatggcacatgtcagttgcgctgaatatctctcattgggtcttatctgttctgatgattatatggaggttgtacatttgacagagtactacttgtatgttgatgtgtctaagagcatcacattgagagacacatgtcactgtgtctttggtgacattaacccagatcacttagttgatagctgccaggtttctcctctaaaggagagagatgctttgtgtagagagatgctttgagacttcgtaactatctttttcctcatcaaacatttgttttatcatctattgtgattgttgcctaaatgtttttactatgatggttgcaaaatggtaattttgttttaattttgtcatcctttctacatttattagttgacattctataaggtagtgctttgttttctcgcctttatatttgtcatatatgatcactcttatgggtttattttattcattgggttataaccattgtaatggttatttattttgatgctcaattgtcctagatatggtcagtggaagcccctataggttagacccagacatacaacctcaatttttttaaggtactttattgtactttattattttctggtatgagaagatgtttcaagcttatctatagtatttcctctgccccagctctggaatctgccattccagagtttttagaaggaagggtatttagaaatcaaaatccgaggtttaaatcttttttttttttttttttttttttttttttgagacggagattttgctctgttgcccatgctggagtagtgcagtggcgtgatttcggctcactgcaccctctgcctcctgggttcaggtgattctcctgcctcagcctcccgaatagctgtgattacaggcacctgccmtcatgcccggctaattattatatttttagtagagacgaggtttcaccatgttggccaggctggtctcgaacgcttgacctcaggtgatccacccacctcggcctaccaaagtgctaggattacaggtgtgaaccacagtgcccctgccaagtcatccttatttcattctaattgtggtaaggtgatacctcattgtggtttggatttgcatttccttaatgattagttatgttgagtgtgctttcatgtacatgttggccatttggatgtcttcttttgagaaatatctattcaagtcttttgcccattttaaaaatcggattttttgctgttgagttccttatatattctggatattaaccccttgtcagatgcatagtttgcaaatattttctccaattctgtagatttgtctttttgtggtcttatttcctttgttgggtagaagctttttagtttaatgtaatttcgtttgtctgtttttgtgtttgttgcctgtgcttttgaagtcttagccaaaaagtccttgcccacactaatgacatgaaacatttcccttgtgttttcttctagtagttttatagtttctggtcttacatttaagtttttaacccatcttgagtttatttttacatatgatgaataataggggtttagtttcatttttctgcatatgtatattctgtttttgcaacaccatttttattcaagagattgccttttcccccaatgtgtgttcttggcacctttgttgaaaatcagttgtttctgattatgtggatttatttctgggttctctattctgttcaattgatctgtgtctatttttgtgtcaataccatgctgttttggttactattgctctatagtaaattttgaagtcaagtagctgatgccttcagctttgttcttcttactcaagattgattcggctatttggagtcttttgtagttccatatgaattttaggagtgttttttgtatttttttgttttaccttgcagattcacctcaaaggatgttttttctatttctgtgaagaatataattggtattttaatagagattgcatcaatctgtagattgctttgggtaatatggacattttaacaatatttgttcttccaacccatgaacatagaatatttttccatttatttgtgtcctgtgttcgttctttcatcagttttttttgtagtgatctttctcctccttgcttaaatttattcctaggcatcttatatttttgtagctattgtgagataactttcttgatttctctttcagatagtttgctattggcaaatggaaacactacttagttttgtatattgatttttgtatcctgcagttaactaacacaggttcacgcttgtaccagtccagcttcctagtcatcttccattccgtatttgtatctctacagcaatgagaaatctgaaacctgagggagttggaaaggcttcttaatcagtcttcagcctctgtctttaggccttcgaatcatttgtgccttcccaagtgtttgttgttttcatacccttggcttttctcagatttagtggggcattaatttataggcaccctcttctccttgccttcacaacaactaaaccaacttcacaacttcagctaaaccaactatctatccccatcttcactacaccgtcagtaatttgttgacagctgtttaatgtgttgcttccccttctgtttttatgttcttttgagtttatgtatttttatattcattcattctcattttagtggggtttggggatgaagtactgataaatatagygcagtacaccatatttagttgacataatttttaaagctgtcttctgcttttattacctccattttctaaattaaacaccttgttgggcttctcatcttgctttgcaattattatgggacagaagcatttcacattagattcttagctaaggcttctctcaaaagatatatttcattcttgtctgttacatcgtttagaatttacatagtttcatttgttagtatttcagtaatagtccttgcagtgctttactgcagattcaaccttcacaacatactgtaaaaacacaaacccaccactgaatccttgatcttgtgattggcgcttaatgccaccagatggcgagcatgagctcttgtcagacagttaaggcaagaaacttgaagtgggtgctttcttcatgttttatataatgaaactagaatacctaaatttgaaacagccagcttttgaaaaagctggtaatggttrtattgcagcagaaaatcataggctttggactcaaatggacttgagttccaatcctgcttctaattgctactctatggcgttaaacataagtttcatagtttattagagcttccttatccttagaactgggataatgataacttttttgtgtaattgcagggattaaatgaaacartgtatggaaaacccctagcctagggactggcacttagtattcattaaacattaaaccactctctgtcacttccttttcttagagctcctgcttcctttcttatttaagagtttgtgtctaaaacgtggtratacaatcttttgtaaaagtctgttgtaagctcttagcactgataaactcaacttaaaccacacatcatctctataaggtatagttaatgactaggaaaaaagctaatgattctctctttcccctccatttaaaatacatccaagagtgcacaaatgctaaatgatcacccaaatgttacacttcttttcattctgaatctttgcctgaagccaagtgcccatgttatgatttgctgttaaacttaaaacttctgcagtcctctctatatgtaataccatcttttgtaaaagtctgttgtaagctcttagcactgataaaccacacaacatacctataaggaaattattaattttatctgtattttaaagacggagaaactgaagcacagagagattgttaattcacctgggacacatagcttaaatgctatttctcatttctttttttttttttttttttttaaagagagagggccttactctgtgtcccaggctagagtgcagcagcatgatcctagctcactgtaacctcaaactcctggcctcaagtgaggctcctgcctaagagtagctaggactacaggtacacaccaccacacctgactttttttttttttttttttttttttttttgagatacagagtctcacactgtcgcccaggctgcaatgcagtggcgcagtctctgcttactgcagcctgtgccttctgggttcaagtgattctcctgcctcagcctcccgagtagctgggattacagatggacgccaccacgcccagctaatttttgtattttttgtagagatggggtttcaccatgttggtcaggctagtcttgaactcctgacctcaagtgatccgcccacctccgcctccctgagtgctgggattacaggcatgagccactgcgcccggcccacacctggcttattttgaaaatttttttgtagtgatgggggtcttgctgtgttacgcaggctggttttgacctgggctccagtgatcctcccatcttggcttcccaaagcttaggtatcttttcaaaaggctagaaagaaaccaaaatcgtcataaactctggatgacaagattatgactggcttaaatttttctggcttccattttttataaaatgtaacatgatataatcagggatgaatatgagagctggaatggccactgagtgttaactttgattcagatctctcaaatgagtaaactataattcaagaccattaaatgatttgcttagaattcactacttctgaccgggtcaygctggtaatcccagcacttcaggaagccaaggtgggaggattgcttgagcccctggagtttgagatcagcctgggcaacatggcataactctgtctctacaaaaaaatatgcaaaaattagctgggcatggtggcacatgcctgtggttcccaactactcagaaggctgagatgggaggatcacctcagcccagggaggttgaggctgcagtcctcacgccactgcacttcagcctgggtgacagagtgagaccctgtctcaaagaagaaaaaaaaatatccaccacttccttttcttgagctcttctttttttttttttcctcctactcccctttgcctccatccttcactcagaatatttttaagccaagcaagatactatgagatacagtggttaagcatatgaattgggttgcttttagggagtaatttgacaatgtatgtcaagtctttgggcattatgttcaacttctttatgcttgcagggttttgcatggtgaaaattataaaaattcagctgctaggatctttgatgtttaaaaaggtgaggggaggtaaaaacctaaatgcccaataataggaattaaactggtaaaataatattgtcattttaataatcagataaaatgatatagatgaatattcaatgacacgagaagatatttataaatattttattataaaaactattttaattggttacattatatgtcgctatgccttcagagtagagagaagtgacagtttcaacacaaactgaaaaatttgtaagataatggctgctatttctaggcctgtaaaaattcatttacccaaagaaaatcatagtttttttttttttttctggagatggagtttcgctcttgttgcccaggctggagtgcagtggcgcaaccttggctcactgcaacgtccgcctcccaggttaaagcaattctcctgcctcagcgtcccgaatagctgggattacaggcgcatgccaccacgcccggctggtttttgtatttttagtagagatggggtttcatcatgttggtcaggctggtctcgaacacctgacctcaggtgatctgcctgcctcagcttcccagagtgctgggattacaggcgtgagccactgcgcccagacctatttttcttttctttaaaagaagcttttacttaaaaaaaaaaaaaaaaattatcaaggtatttttttaatcatagggcagttaccttagatcatcaaaatactttccaaggttgattgactattaataaagttggaatatttggtagctaatgcttaattgtattttgggattatcttatttttcccccactgtgtcttttcaccgtaatttaaaattatgttttaatattatgacaaaargacaaaagctctgcttgctttgaggtgaatgtacataggcacttaccctttttcgatgtttgctttttagggttcattttcttggatatcactacattcctttcagtgaagcaagccagttaatatatagtgtcagggggcaaacaataaagaggttagagggaagagtttataatttttttcttgttattttcagtcagaactacttccttttgaaatgtatttttttccatctccagtggctgagaggagagtatcttgatttgaggtccctgagtagcagatgctttgtattgagagtaactgattaaagagccctgttttttgtttttgtttttgtttattttttttttcttttttaatcattccaggtcttgtcatgtcttaggaagtttgagcctatagcccaactgagtggattgttattccatattagtatggtcttcaagatatcaaaagttaaatatgtatgaacacatgaattacattttcacactgtctctttttttcctccagatagcacaacgatagaaaaattaagagctatttgtttagaccatgccaaacttggagaaagcagccttagtccatctcttgactcacttttctttggtccttcagcctcacaagtgctatatctaacagaggttagtttttggggttttttgttgttgttgttttctttgtttttccttttaaatttrttctgtgttctttaaatttgacctttcatatggtaaggtgaatgatttgggtaaaattgtaatgaagtagttttgaaatgaaatattaatttgaaataaataatagtgagatggtcaagagtttcttggcactgacaatagtacaaatagaagttattttttttttaaatcttttaatacagccctctccccctcttctctatttttccaggtagtctatgccttgttaatgcctgctggtgcacctctggctgatgattcctctgattttcagtttcacttcttgaaaagtggtggcctaccccttgtactgagtatgctaaccagaaataacttcctaccgaatgcagatatggaaactcgaaggggtgcctacctcaatgctcttaaaatagccaagcttttgctaactgccattggctatggtcatgttcgagctgtggcagaagcttgtcagccaggtgtagaaggtgtgaatcccatgacacaggtaatacagacttttyaaaaatccttttataatagtagatagcaatttttaaagtaaaactaattagtattttaagtgtagagttcaaggttgactcaatgttcaaagtgccttatttcagaggttttctttatgatgtttgtattaaaagtgcaaatacttttcgctgacagctgataatctgagggtagtttctccctgcccacttaaatcttgcttgactttcatttattttaaacctaacaaaaactccatatgaatctcttattaacttgtgcctggtagatatataaagacacagattgtaataagagatataattggtttatcttgttgcttgtttcccttcccaccttgggcttaaacccaagttctgagcttattctgactcggtttctgccttggtggcattcttgatccatgtcacaaaaaattctcaagacatgccagaatttgatacttatttatgagagatcaaactatgcatttaattctaagtaaagttttataaacatcataaatgattgttttactaagttactgatagaaggtaaaacttcagggataaagattttcttctttagaaatggcttagttttcaattgtggagatcagaatgttgatatttatggtaatatcacatataattgttttagctatgataatactgtggttatgtttaaaaggaagagccccctatatttttgaagtgattgctaagatacttccaggtgaaattacatgatatctaggatttgcttaaaaacaatcctggggtggagaagtgatggaaagcaagggaggatagtcagattaaacaatttggttcactggcgataattcctgaagctaagtaatatgtacatgggagttaattatactactttcgacactttgatgtgtgttacgaattttctgtaaaaaatggcttaaattttatattgttttgtatcacaggtcccatctttgttaggatttttttttttttaaagtagttcttattaggtaagtaaaaagacagcttcttgttaggataaaaacagatttttgtcatgatccctgacacagatacttaatgaagtamacagaaaacaattacatgtttccactttcacctttcttcagtatttattcagagaatgtgccactatggatacagaggtacataataacctctaatctcaacgagctcacagtagggagcccaatgcaaacttagtaatatagaaatatcttaaaataatattgttgaaatatttacagtatatatatataggaggggagttacaacttgaaggcagtcagaattacctcgctaacaactacgtaatgaaattaatctgtcactgatttaacaacttgattatagcattaagtaaaaactagggtacctttcatacattagtcctcttactgctttttcagtattccttaatttttcttttttttttccaaagaaaaatgtggtaacaatggggaatacaagcagggtctgcccaaggcatgtacataaaagatgtacaatactttactgagtctctagaagggaaccagtctatttagtgtatcattatcccctgcaagttaagctgaggccagatttagagacacgagttgattgctctagaatggggatttgcagacacgtggcactacagtgcacaaggaagagaggaagcccactttgttggcagtgctttttgtgtaagttgccacaggttctataatgtgtatatgcaaggaagtcgttctgcaggagtgggtgatgaatgaagagcaattggttaggtctggttatgtacaaattatttactccaaataaaatggttaacttttttcagatcaaccaagttacccatgatcaagcagtggtgctacaaagtgcccttcagagcattcctaatccatcatccgagtgcatgcttagaaatgtgtcagttcgtcttgctcagcagatatctgatgaggttagttttatcaagacttctgtcacaattttaactttcctaggcccacttattttaatcactgtctcattctatagataatgtccccttaatatcagttttgtctactattaatattagtactttctgtttttaatcaactttatgtataataaacagcatccttttaaagtatacagatggggtgattttttttttttttgagacggagtctcactctgttgcccaggctggagtgctgtggtgctatctcggctcactgcaacctccacctcccaggttcaagtgattattctgcctcagcctccacagtagctgggattacaggtgccacacccacccccccatgcccggctatttttttatttttagtagagatggggtttcatgatgttggccaggctggtctcgaactcctgacctctggtgatctgcctgcctcagcctcccagagtgctgggattacaggcatgagccaccatgcccggcccagattcggtgaattttgacatatatgtgtgaaaccactgctgcggtcgaaaccgaatgttttcatcactctttatgcacttttgcagtttattctttccccaggtaactactgctctttttgtccctagagagtattttttgtcttctggagttttatataggtggattatagtgtgtgttcttttgtgtctggcttctttcactaagaataatgactgagaattacctgtgttgtgtggattagtagttcattcctttttattgctaactagtacccattatgaatattccacattttgtttatccatatacttggtgaaggacagttggatcattttccctttttggctgtgaataaagctgatgtaaacattgtgtacaagtgtttgtgtagacataaattttcatttttcttggataagaaactacgagtggaaaggttgtcatctttgtagtagtaaaatgtaatagtaaagagctagagaacttggggagcgtactttgttgtattgctgtttaaaggcaggaggtggggaataagccaggtgcagtggcagatgcctggacttccacctacttgggagcatgaggtaggaggatctcttgagcccaggagttcaaggctgtagtgagctatgatcacaccactgtactctagactgggtgacagagccagagggccctccgcccccacctttttttttttttttttttaagacaaaggcaacttgggaatttaaaaacaatggtactacacagtaattcctatttcctttacaaagtgaaacatttttgtttttctaaacataatttcactctcattctatcaacagttctatttactcgttatcttgcaggcttcaagatatatgcctgatatttgtgtaattagagctatacaaaaaattatctgggcatcaggatgtgggtcgttacagctagtatttagcccaaatgaagaaatcactaaaatttatgagaaggtaagaattatcacagaactatattccttgtaaacaaatgtttcttaattgtgcatgtggtttgatttttattagctttgctatttttaaaaattgaatcacttgcatcttaatggttgaaaattaattgatagctatgttgagaatatggtaaaattttactttgaaaatgaagtacttaagaatcgtgccatgtggctgctttttaaatgaaattgccttttgctgcttcttgtgggggtcagatataattgtctcatactgaatttgctttatcccattctcttttttcttttatcatctttctgtcctgcgtaaattttggtttgtcagttatggtatggcatttaagtayttttatttgattgtcttaaagcagtcaaaaataagagtgttagccaattagatatcattcctgaccttctattagattaagcaaattatctacagaagagaagctgtggttggctttttgatttatcatgtgtacctgcccctgatgctacatatttagaaggagaaattgagttacaggaacttccctgacttggtagagcttcttttacatggccaacatcaccctgatttgcccaggatatatgttgatgttccatagtatctgtctggcacagccctgggtattcattcagcttattaactgaatacttattctgtttcaggcatgtactgtagttactactttttgattaataaagtcagattagaattcattaggtacctccccaggcatattttaggttgtaagcctttgaaacccttcctgaatagttgtcagacaattgattttgaataaaatggcacaataggcaagcaacataatggaactagtcaaaagtacctaagtgctatgccacagtggttcctgagaaaggattggttgttggttcagaagtaaacaactcagaaggtctcaaaaagataggtagtgtgctcagtgtgctccttcagccctcctgaagacataggaaaataatggaattagactttattttctattatagtcatttccagactattccaraggggcctcaagagttaacatgcagccatggagaggctgaggccaggtggtttaagtgagcagatgagttttaagcactaactagaagttgtgtgagatttttcttaaatacttctttgggtaatttgttcttgattgtaattttacagaccaatgcaggcaatgagccagacttggaagacgaacaggtttgctgtgaagcattggaagtgatgaccttatgttttgccttgattccaacagccttagatgctcttagtaaagaaaaggcttggcagacattcatcattgacttactattgcactgtcacagcaagtaagtatcttttttaattgtaagaaacttactttttgtaaatggagtgaattaatttaggctggcaaaatgtgtccccaaaattaaatatttattgtctctatggcatattggtattgaggaaaattttattatttaagagtgttttgcttaacctaaatgtttggttttagtctctgcaaatgccaatattaattgtcaaagcatgatttttttctaatcttagaatttagttttacctgggaggtatatagattagcctatttctaaaaatctagtttgcaagatttaaatcatataggacattagcctcctatcttagattcctagatgccaggttttttttaaagccaaacagaatttgatatgaaatttgtaagacagggtcattgtaagaacttttgcagtttacactgataataaagatcagttataaagctcatgttttcatttcaagagcatttaatcagtggcagtaattttgttttgggtttctttttctgcaagtcagtcagatttatagaaaatgttggtttccatcctcttgtatcagtctgatcctgatcttcgtatatggtaactttattaacttgggctctaatttgtgtcactgttgtatgtaattaacttgttttatctgtattttgtgaaaagacacagaaaatgtttactttcatcattccatcacatgccattcaataatgacaaaattcattgatgaaaggttgatgtaaattcacaataagtcatttgttgaaatgaaacatagtaataattaaagttttaaaaatgtacatgctgtggggggtagggttcaacttgcccactcgagaggatgtagagtctgaagtgggaatgtcactttagagtctaaagtgatttagtgggtttaaagtgtgaatatcacctattttaagaaggtccttgggtaagttctttgaagaaatccagtccagcctattcagaaactcttaacaggatccccacaaatcgggttgggcgtgctacctccttgagaagacaatcctgcacgttggaaaagataaataggtttagtaagtctaattccatttaatgatgcatacgtgtgggaatggtgaggataggaaagatgattagccaacagttttaatgaygtcaaacctggagggtagcaagtttgttattctatgttgaatttttaaaatcttaaattaggaacttatttcatctcttagtctactaactattaaggaacttgatttaacagggttttttgccctctaccctttatgaaaattacccttatataagtcagaaccattttgcccctctcttccctgaaacttgcatgcagtgcggtaawgtactgtagaaagcatgttatctcattatgtcmccatattgtctgcaataatagggagggcgttctaagttaggatctttttgagttttaagtacctgattttttataaatatctgaatacctatgtaggttcaaaatccattatttcccgttagtaagaatttgtcagcaagtccgacttggacattaattattggcattaatattctaaaatctgaatccccaggccgggcacggtggctcatgcttgtaatccctgcactttgggaggctgaggcaggtggatcacctgaggtcaggagttccagaccagcgtggccaacatggtgaaacctcgactctactaaaaatacaaaaaattagttggacattgtggtgggcgcctgtaatcccagctacttgggagactgaggcaggagaattgcttgaacccggaaggcggatgttgcagtgagctgagatcgcgccattgtactccagcctgggcaataagagtgaaactccatgtcaaaaaaaaaaaaaaaaaaaattgaatccccaaatacatactggccccaggggtttcaaataagggattgtgagctgtgtacaaatctgcccctcagatggagtttataatcctatagtaacgtttaagcatagttatttacaaggtacttctcacttaatccgtatagcaactcagaagtagactttgctgatggagaggcacaaggactgtagaaattaaatgactaacaagggcataatgatcactaaatgctaacactaagactgaaggttttctgcttcttgagttctgacatttctgccacacaaattgggctctgggtgtaattataatccaccagcaaatatgtgaatccctacctatgtgcttggcaattaaaaccaaagtcaaataaggcagttcttgcactcaaggaactttgagagagaaattggtgccataaaaggtaaaatactttgagaattggaaaggccataacttactttctacctggaaggagcaaaagtgaaggttttgtgcaggatgtagcatgygagctcatgtttgggcaggatttatatgtgcataaaagtagaagatggtcattgccagtgcgctctctctctccctttctcactcccagttatgtggcttttacttcatgtgtctttgaactccatacactttcctcctcatggtctaccctgatctaagcagtctggacccattgcctggacaatcatagtatccttgatcttcccacctgtagtgttgtactcttctaatctgttgactryacggcaagcagagtgatctctagaaaatatgagcatgttgctttcctgcttaaaatctttccatgtcttcccgttatctttgaattaagttcaaacttttaaatttggcttataagcactccataatttggtccctgcttctactcattcagaagtttcaacttaaatgccacatattctagtaacttttccttatccctaatctaggaaaggtttcctagacctctgttcctgttagatggtctgcttccacatcatgacactgactttattttattgtagttagttgcaatggatttaaattcttttagataaacgatatttttttctgctgtttccacagcctgttgttttattccctgcctagttaactcacttatgttacctctctgatccgagaaagcatttgactttgccackcctgggatagtgctttcagagcagagctgagtatttggttaaatgtttagaaaaggagtcaaggataatactgtacaggaggttagtgggagtcagtttgacagaaggcctatggtgctaaggtctaagcagtgtttgatgttaatgtggtgtaggcagtctcatgtatatgtttggtaaatattgatcaaatacctattgtctacaagacactacccactgtggatatggcaaaacagacaaaatcttagccttctaggagcttacatgccaaaagggatgggggaagagaaggcatacgagaagtatatcagataggaataagtgctatgggggtgaaataaagcaggaaaaggggctgtgtagtacggggcatgagtggagttcatttttttatagggtagttgaagaagacttcacaaaggtgatagctttgtttagaggtcaccttttatcattacctttcagagcaaagtaataatccatgtgactcatggagaaagtatattttaagcagaaaaaacaacagatgtrtatgyccaggcatgtcaggaacatgcctgacatgtgaaagaacagcagggaaactggagtggatggaacagaggcggtaggggacggggacagttgtagggartaaagtcagagaggataacaaacaccctgtgagggtttttataggtcattgtgaagacattgaccctaagtgagatgggaatctttcagagggttttaagcagagaaatgatgtgctccaccttaactttgtaagtttattctggttaagaatagtatgtaggatagcaggaaaagcaagctattttatgaatttaaataaaagatgacagtgggctgcatgcagtggtggctcatggttgtaatcccagcactttgggaggccaagacaggaggatcacttgaggccaggagtttgagaccagcctgggcaacatagtgggaccttgtctctaaagaaaatagaaaaaataagccgggtatggtgaacatgcctgtagtcccaactactcaggaggctaaagtgggcagatcacctgagcccrgagaggatgaggctactgtgagccctgatcgtgccactgcactctagcctgggtgacagaacgagacccagtctcaaaaaaawtttttttttagctggatgtggtagcatgcacatgtagtcctaactagtcaggaggctgaggtgggaagattgcttgaacccargagtttgaggttacagtgagctaggatgatgccactaaacagcctgggtgacagagggaaaccctgtctaaagtaaaagggactgactgttgtgaagatagaggcaacaggattagttgacagaaatgtgtttcttttgaagcactctagaagtctgcatttgctcagggaagttctatcgggtattcacgagcatcaactttttattgcccctcatatttgggctgtatacctagcttattgaaaaattagtaaaccaaagcagtgggaatagcatacctttgaaaatctgattaagttatgggcttgctcccagaaaagtagatacgcctgactttggtttacttgggttccccccaaattctacctccaaaaattttaggggcttctgaatccctctgatttataggcctatggactgttttcagaaacctaagataccctctagggagggaggttagtacacagaatgtatgctgtcaggtcctttacacttgtactttaaattaagttctgagggctgggctcagtgactcacgcctgtaatcccagcactttgggaggccgaggcgggcggatcacctgaggttgggagttcgagaccagcctgaccaacatggaaaaacgccgtctctactaaaaatacaaaattagccaggtgtggtggcatatacctataatcccaactactcgggaggctgaggcaggagaatcgcttgaacctgggaggcggaggttgcagtgagccgagatgttgccattgcacaccagcctgggcaacaagagcgaaactctgtgtcaataaataaataaaaataaatttggttctgagttatctagtaactagcacaaagacagaaatgtagttatccatgaaatgcagtttgtgatgtctataagatattcacaaatgcttagcaggtacttgttgagcatcttccatgtgtcatacattgttctaggtgccaggacctttggcatcaagaaagcccctacccttaaagagcttactttgtaatggagatagactacacatttgataactggttcttgaggtcctcttatacgccagacactattctaggttccaatggcacagttttaattaaaggtagatgatgtctctgccctcttggagcattttattctagtgagatctatatagtacataacagtttttaaaaaagatagatccatgattcccagatctgagaatcatgagacarggttttcccaagggtcatcagagagaaaatatggtattgtgattctcaatctttcttttttctttcttttttttggagatggattcttgctctgtcaccaggctggagtgcagtggcgtgatctcagctcactgcaacctccgccttccgggttcaagcaattgtcctgcctcagcctcccaagtagctgggattacaggcacccaccaccacgcctggctaatttttgtatttttagtagaaacggggtttcaccatgttggctaggatggtcttgacctcttgacctcctgatccgtccgcctcaccctcccaaagtgctggggttacaggtgtgagccaccgcacccagcctgtggttctcaatgtttagtgcacatcagattgacctaaagagtttattaacacattgctgggccccacctccagtatttctgattcaggaggtctgcattggagcctgagarttggcatttctaacaagttcccagataatgctgatgttgctgctctggggaccgtgcttttggaactgccagtacggtatacggcagcagtccccaacccttttggcaccagggcccagtttcatggaagacaatttttccgtggatcagggaggtagtgggggatggtttcgggatgaaaggattccacctcagatcatgaggcattagttagattctcataaggggcacataagctagaacccttgcatgtgtagttcaatagggtttgcgctcctatgagaatctaatgccaccgctgatctgacaggaggcggagctcaggccataatgctcatttggccttctggcctggggtttggggacccctggtgtaagagacatctgccacaatagccttaccgtggttactacagaatttccacagagctgttgtgcagaaccacagttgaataaaaattctgtggaaggccaaaaagatgcataaggttattgtagtagagcatttggtatatagaggaacatttccagcctgttccaagaaagaggtgttagaaggtggtatccctcaaactcttagtgtcaatttgaggttatagtcctggacatasagcttaagttcatgtattatgtggtgttggcttgagtgcttgttgtgtgtaggtagggtaatcctgtatccttactattaatttatttcccttttatactccccccacctctcctccccaagagggaacaatgttacaatcattttttaaaatggaaataatgtattaaatgtgaaacattttttatttcagaactgttcgtcaggtggcacaggagcagttctttttaatgtgcaccagatgttgcatgggacaccggcctctacttttcttcattactctactctttactgttttrggggtgagactttttaaaatatgcttatcaatgtgattcattctttaagcaagaaacattcagaaatttgtggttttagcttgcattaaagttaggacagtctatatttaataaatgaagtactactttatttcccgcactgtggtagtcatcttctctagttaactctgggtttttaaaaaagtggattttgaggatggacgtgtaaattgatattattctactctgtttccagagcacagcaagagagagagctaaacactcaggcgactactttactcttttaagacaccttcttaattacgcttacaatagtaatattaaygtacccaatgctgaagttcttctcaataatgaaattgattggcttaaaagaattagggtaagttttagttaatactccatttatatgtcattattagtaaatagaatgttttattgatgrtttatattttttgagcattttggttaaatggaaaactccaaagattgataaaagggaccaaagaatgtactctgcatcagtggacgttagtaatctgtgattcacaaaatgcatatctagtttagtaaaatgaattgcttacttgacacttgaaatactgatgttcagcttcttttattttagcattttgggcctttttgcaaattctaatttttaaaaaaagtattcttgaattgtttatgtcaaaaatgagtctgatagagcagaactttctaccataacatctgatactttttacttaggcaaaatgatacaagaatttatttctgaagagatttgtagtttttarccttcaaattagcatttcttctagtagttcataaagccaatttctagaaagttctgaagaaaacaaagttgtttgaatggaaagacttaaggaaattatctcatatccctccagctctgtctcgttctggctcctctctccctctttacctccctttcataagctagacatttgatttcttcccccccccaccccaccccccgcctttggcaggatgatgttaaaagaacaggagaaacgggtattgaagagacgatcttagagggccaccttggagtgacaaaggagttactggcctttcaaacttctgagaaaaaatttcatattggttgtgaaaaaggaggtgctaatctcattaaagtaagttctgtgttcttggttgtaagctacatatcataaccttctaaatgtttataatcaaatttaattaatttatagtagtatcatgtctttgtactttcttgatcttttctcttttttaagaatctttatcaaatttacagtaatttaagaaatacagttatgccttactttattcaagagacatttctaaatttgtatttaaataagatttcatggctggacttgctggcctcatgcctgtaatcccagtactttgggaggccgagtccagtggatggcttgagcccaagagttgaagaccagcctgggcaacatggtgaaaccccttctctacaaaagaaaaaaaaaaaattgccaggtgtggtggcgcacacccatggtccccagctacttgagaggctgagatggaaggatcacctgagcccaggaggtggaggttgcagtgagctgagatcgcaccactgcactccagcctgaaggaacagagcaaggccctgtctcaaaataaatagataaataaataagatactttataaagtaattgttgtttagtttttctctttggaaaatctgaattgttaatttcatttaatgaggcaaacctctgttttgtaagaatgcatcttgtatatctttaatgagttttttcatacatgtagtaacacaaggaaacaaagtttcatttttgtacattttatttctattcaaaatgggtttaatttgctatacacttgattaaaggagcaaacatttaaaataaaaattttgataagtactatattcagttctttcttaatatttacaaatttatttaacctgcgaaattaggtatgttagtgatagtaaatagtgttttgaaggaagatctttttattagaaaatctgagttttctgagatgtaatgagatcttaaattccaatgagtaattttaaaatgatttacttacaagagaactttttttttctaaaaatatatagcattgctaatatgtaatccctttttcaactttttaggaattaattgatgatttcatatttcctgcatccaatgtttacctacagtatatgagaaatggagagcttccagctgaacaggctattccggtctgtggttcaccacctacaattaatgctggttttgaattacttgtagcattagctgttggctgtgtgaggaatctcaaacaaatagtagattctttgactgaaatgtattacattggcacagcaataactagtaagtatttttaatagaatgtgataattgatcatttcaatgtttcaaagttgttttcctgtttttctttcagaaaatatttccaacttacgtatttctttcagtaactagtttaacatttttagtgartgaatgwacagttaagaccattataggccgggcacggtggctcaggcctgtaatcccagcactttgggaggccaaggtgggtggatcacctgaggtcaggagtttgagaccagcctgaccatggtgaaaccctgtctctacaaaaaatacaaaaattagctgggcattgtggtgcacacctgtaatcccagctactcaggaggctgagacaggagaattgcttgaacccaggaggtggaggttgcagtgagccgagatcgcgccactgcactccatcctgggtgacagagcaagactccatctcagaaaaaaaagaaaagaaaagaaaagaaaaaagaaaaataagaccattataagcagaccaccttgtatagaaaaaaattcaaacatttgttaagtggcatcctataagtggtgtcgccatttggcaagataaatttcatctcatgaaacctgtcataaaattcaaactccagattaaaaggtagccaaagtaaatgccgtagagtatagacgtaaaactttattttatttatttatttttttgagacggagtttcactcttgttgcccaggctggagtgcagtggcgcgatctcggctcactgcaacctctcgggttcaagtgattctcctgcctcagcctcccaagtagctgggcttacaggcgcctgccaccatgcctggctaattttgtattgccaccatgcctggctaatattgtatttttagtagagatagggtttcaccatgttggccaggctagtcttgaactcctggcctcaggtgatccacctgcctcggcctcccaaagtgctggaattacaggtgtgagccaccgcacctggcccagacttaaaactttaagttgcatgtattggaaaacctttcaggtcttcacttagaagttccgtaacgttatgagttcgaagaaaatctggctttgaagattagaacgtgagaagttaccattttggtgcaccttatttatgttctcatttaatgcccacaccaggcgcatgaataggctgcagatttcagaccttacagataaggaattgaagctcaaaagggcaagggcaatataaaatattaataacagaaaaagcagaaataagcataattgatgctgttttaagagaaaatcgctatttagaacacttaagaatataattgattatagtaaatctttaagaacatgtcaaattactttttgatgtgtttcagaatgtttggaagttttaaataacatctcaggaatttctgaataaattgattgcttaaaaggttagacctttagctgtcctatcaaatctatgtattgtgagaattcttgtattttttttttaacttaatgggggttaattttttaatcacagattggagtatagtacaacgttgtttgcatccttccctatctgccattgttccctgtcaacacagaaatatttacctaattccatttttggccatgcagtttggtatgatataattaactggccccctagacaatgatacttaatgttgtttccaggtttatactaggtggagggagataggaagatgtacagtgatttacaattatcacaaatctgctgtcttgcttgctcctcaaaatagcattatagatatcaggaaagcaagtgttacttttattattacatttactaggaagaaacagaaagttacctaaaggtgggggaaaaaaagtggtaagcatcagaaccaggatgtgagcccatgtggttttaggattatttaaaactgagaaaattataatgtgttgatatatttagataacatttcattccttgccaaatttgaaggcaaaagtatcaaatattaagaaagtgaataatggctaaaaataaagatgcaagtaaagttagcatgtagacattagaattatactatcttgtacttttgagactgccatagaagcaacatcatatgaaacgggtttgcgggtgattggataagaagctgcacagtggtgcctgttgctgtatattttagattgttggaagatgaagtgcaaactcagaacactgcttcaggttgctgtagggttagtcgaattatgggtggtagaattattgccagggttgctttgtcagcataatagagtttgaaaggacagaatggccgtgttcatgctacaagaatctttccttctctcagcttgtgaagcacttactgagtgggaatatctgccacctgttggaccccgcccacccaaaggattcgtggggctgaaaaatgccggtgctacttgttacatgaattctgtgattcagcaactctacatgattccttccattaggaacggtattcttgccattgaaggcacaggtagtgatgtagatgatgatatgtctggggatgagaarcaggacaatgaggtaaatttgagttaccatttctgttttctgtgtttcaagttatgataccagatactattctctcttaagagagtgttatnctttcatcaaacgtattaaagtatatttgaaagttagggatgggccgagcacacacctgtggtctcagctactcaggaaactgaggcaggaggattgcttgagcctgggagctggaggctgcagtgagccatgatcatgccactgcactccagcctgggttacagagtgagaccctgtctcagaagaaaaagaaaaagtaagtagggatggacttctcccagccagcatgaactgctacctcttaacatagtatagttctcactacctaccagaatttaaactgcagataatttttagaatggtttgtacatttctaaagcaacagttggctgggcatggtagctcacacctataatctcagcactttgggaagctgaggcaggtggatcacctgaggtcaggagttcaagaccagcctggccaacatagtgaaaccccatgtctactaaaaatacaaaaattagctgggtgtggtggcacatgcctgtagtcctagctactcggaaggctgaggcaggagaatcacttgaacccggaaggtggaggttgcgatgagctgagatggcaccagtgcactccagcctaggtgacagagcgagactccgtctcaaaaaaaaaaagcaacagttaatgtactcgtgtttttttgtgtagagtgtttagtataatttggggtttgtttgatggtaagaaccttcatttttgataatagttttaaatttttacttttctatttctaaattttaattttctattttatgccaagttatacagtatctgccaatttcacyktstgtgcttacttttaggttattctttgaatttcccttagatcatagctcttcttgattaggaaacaaactttccctactttaaatagtctcacgtagtcttgtggcaaaatttaggctgcctactgagtatccagtgcagtataaagcagtgaagaagttgagttgtagtggcgaatcagaattgacataactgtaagatagctctttaaagaagagcatatggcaagaagacttaagttgtggtcatgtttgtgcttaccatgtaatatttccttggttttacttttcctgtttatagtgatagtgggaactgaagagagaagccagagtatattctaattgtagtaaatggttcttttcattccctcccttcagttgccagaactgattttgctctgaagaagtagtttatcaattggagcttctgaaacatctacttgcctcaactcttccctagacctgctgtgccagatggtctagggattgggttctgagcactttcactttataaaaaaaagcttcataaaggacacttatacccatacctgattaaaaaccactgctctgggaaaaaaatgtaattcaaattccagttctggagcccatcatatacctgggatattgagttaaacacaagtagatataggtaattgtactggcaagaagtaaatgaggcatagaaaatataacacaatttcaaataaggtgtaccacttttactctcatggtatcctctgctccatgttgtctctgcaccccagtgtactgtgggagtttttgtggggttttttgggttttggtttttttggcttatgtttttgtttccatccctagagtataagtttctcatgggcagggactggttgttgtctatttctatatcagagttatcagatacaactcagagaatactgaaagatagttaaatgtaaaaacacattcttctttgtagctgccatatgattatgacctttaggaattctgtcttcatgttacatcttacaccactacttctgttgttttttaaaattgtggtaaaatacatataacatgaaacttaccatctgtttttaaatgtgcagttgtcctattaaatacatttacattgttgtacaccatcaccaccacccatctccaaaactcttcatattgcaaaactcaaactgtagtcattaagctactccccattctccctccccacagcctctggcaactactattctttttgtctctatgattgactactctacatacctcatataagtgattatataagtgaaatcatacagtgtttgcctttgcatagctggcttatttcattttaaagtctaagtaatattccattatatgtatataccacattttccttatccattcatttgtcgatggacatttgggttgcttccccatttgagctattgtgaataaggctgccatgaacatggatatacaaatagctgtttgaggtcctgctttcaatatttccaggcatatgctcagaagtggaagtactagatcatttggtgatgctatttttattttattatttattatttttttcagacagagtctcactctgtcacacaggctggagtgcagtggtgctatctcagctcactgcaacctctgcctcctgggttcaagcgattctcctgcctcagcctcccgagtagctgggactacaggcacgcaccaccataccccgctaatttttgtatttttagtagagatgggatttcaccatattggccaggctggtctcgaactcctgatttcaggtgatccacccaccttggcctcccaaagtgctgggattataggcatgagccaccataygcggccaaattttttgaggaactgttttctagagtgactgcaccattttacattcctaccagcattgcacaagagctccaatttctccatatccttgccaacacttgttatactcactcgttctggtagttgacaccctaattgagtgtgaggtagtatctcatggttttgatttgcatttaccaaatggttaacgattttgagcatctttagctgtgcttattattggccacttgttgatcttctttgtctatttttaaattgagttgtgttgttgagttttaagagttctctgtatgttctagatattaactccatatcagatatgtgatttgcagatactttcttttgttgcctgtacctctgatgtcatatccaagaaatcactgccaaatccagtgtcttgaagcttttgccctatgttttttttttttttttaacagttctgtggttttagctcttacatttaggattttgatccattttgagttaatttttgtatgtagtgtttcataagggctcaactttattcttttgcatgtggattatccagtttacccagcaccatttgtggaagagtactagtcatgcaccacataacaacgtttcagacaattacagaccatatatatgacagtagtccaatgagattataatgtcgtatttttactgtaccttttctatttttagatgcacagattcaccgttggtttgcagttgtctacagtatgtagtacartaacatgctgtacaagtttacaacctaggagcaattggctataccatctaggtttataggtacactatgatgttcacatgacaaaatacctaatgatgcatttctcagaatttatccctgtcattaagcaaagaatgactatactgatataggtatattttattgacagatctgagcattttatatacaacagctacacaraggatatattacccccattcacacrtaaagaaacttgaagcctagaaagtttaagtagtttttacttgctcaaagttacttggtttataagtggtagagcctgcatttatgtctagttcagtctaaattactatgctaatgctacactatattatctatctttcttacacatggtcagggttatttggttatgataactaatatgtgaaatggtggggataaacactaaataactaaaaatttataaattgaaaagtgctttggaaatgagcataataggaatacaaatcatttgttcaataactgcttggcatttgtctcaacgtattttattatactttagctcattggtgacattttttggtttctagagcaatgttgatcccagggatgatgtatttggatatcctcaacaatttgaagataaaccagcattaagtaaaactgaagatagaaaagagtacaacattggtgtcctaagacaccttcaggtcatctttggtcatttagctgcttctcgactgcaatactatgtgcccagaggattttggaaacagttcaggtaaactatggatggacagtaatagagatacttcttaaaatgaacatctcaatacactaacattaaacctctaaaagacatgttggaaggcatctttttttaagcactggtaatattcaaactgtccttaattgggtgggtttttttttttttttttaggtccccttaggaagaagtagaaactgccatagtaagtaagggcaacatcctttagtctcttaaccatattattaactttttattaggaaaacatctaataaatacagaagtagaaaaaatagtatgaacccctgtatacttgtcacccaacttcagtagtagtcaacttgtggccagcctcatttaatctatattcttaacctattttttttttctttttttctttttctttttctttttttcttttttttttttgagatggagttttgctcttgttgcccaggctggagtgcagtggtgtgatcttggctcactgcaacatccgcctcccagattcaagtgattctcctgcctcagcctcccaagtagctgggattacaggcacccaccaccacgcctagctgattttttgtatttttagtggagacggggttttaccatgttggcccagactggtctcgaactcctgacctcaggtgattcccatctcagcctcccaaagtgctgggattacaggcgtgagccactgtgcccggcccctacctatttctttctagattgttttgaagcaaatcttagttccatctgtaaatacttaagtatgtgtctgtagtgtctgtctcaaaacatgatcatgataccattatgtttttttaaaattgcttaatatcaaatatctctgtcagtgtttgaatttaccgagttatctcataactggtttttactgatattttttaaaaataagattcagttgaggtccatttaccacaaatggttggtaatgatcttgattattcatctgtttcttttttccctttacaattatgggggaatcggaggacaaatagtttagcatgtaaattttcccacagtctgaattttgttgatggaatccctgtggtcgtttattattttctgtttttcttggtcacctgcatcttctataaacaccttatgagatctagaggcttgatcagattgtggtattatttttctttttgtggaatggataggcaacgctacttcataggggataatgtttatctccatgaggagtgacattataatgtctgtcttcttatgatgttaacagcaattttttattattattattatatatatacaatttttttttttcccctgagatggagtctttgctctgtcgcccaggctagagtacagtggcgtgatctcagctcactgcaacctccgcctcctgggttcaagcaattctgcctcagcctcctgagtagctagggttaacaggggttacaggcgtgggccaaccatgcccggccaagttttgtatttttagtagagacggggtttcaccatgttggccagtctggtctcgaactcctgacctcaggtgatctgcctgcctcccaaagtgctggattataggcatgagctactgctccctggcctttttttttttttttttttttttttggagatagagtcttgctctgttgcccaggctgaagtgcaatggctcgatctcagctcactgcaacctctgcctcccaggttcaagcaattcttcagcctcagcctctcaagtagctaggacgacaggcccaccacaccccgctaattttttgtagttttagtagagatagggtttcgccgtgttggccaggctggtctcaaattcctgacgtcaggtgatccacccgcctcggcctcccaaagtgctgggattacaggcgtgagccactgcacctggccaattatcattatcttaatacagtatttcttcagggttataaaataacaatattttattttttcatttaatagctagaaaagatctataaagggaaaattgccctcaccattttctttttaagttagaaaactcagattacatttttatcttgtttcctttgactttaagtcagtactacgtcatgcactgtgctaaaataactacagtacaaccacgtaactcttactgtgtatgaaaaggggtataattctttatagcagtgaggtttggtttgttttgttttgtaagtaatcctccttggaatcccttcaaggtgcttcccggccagctgagaggagcggggaacgaagggtcacctgatactctgatccgccttcccttcttctgacaaagcagtataaatttcttttcctcccctaactaggccctctacttactctgtactagtgtcttgcgtggaccaccctccctcccatctctcattttgcttttagtcccgtcacccagcataccattctccctcctctctgactatttcagttctgtcttctttccctaggttattccaattccatctctgccttaaggctattttagcatttctgtttatgctcttccaaactgaagaacacaaacagaggcttatactgggttttttttttttttgagacagagtctcactctgtggcccaggctagagtgcagtggtgtgatctcggctcacggtaacctctgcccgctgggttcaagcaattctcctgtcttggtagctgggattacaggcgcctgccaccatgcccagctaatttttgtatttttagtagagactgggtttcaccatattcatcaggctggtcttgaactcctgacttcaggtgatccacccgcctcagcctcccaaagtgctgggattacaggcgagagccactgcgcccagctgaggcttacactttttaaactttcgtcttgtcattcagttacaattttttctcttgtaatgcctttgcttttttgacttttcagttactcgctgtgctagtggagctcggtttgtatagactagcactttggattatccacactttagacacataatctactcttgacacaagcgggttagttaactacacttcctcaccccactcttttattttgaaaagtttcaaacctacagaaaagatgaagaagaggtataattatcacctttatgttatattctttatgcggttttactaattaacattttgccatatttgcttatcttgccatatgtgtgcttggtttttggtttattttttttttaagttttgtttgtttgtttgtttgttttttgtttttttgagatggagtctcgctctgtcgcccaggctggagtgcagtggcgtgatctcggctcactgcaagctccccttcctgggttcacaccattctcctgcctcagcctcccgagtagctgggactacaggcgcctgccaccaatgcccagctaattttttgtatttttagtagagacagagtttcattgtgttagccagggtggtctcgaactcctgacctcgtgatccacccggctcggcctcccaaaatgctaggattacaggcgtgagccaccgcgcccggccttttttcttaagttgatagtgaagttgcaaacaggacgcttcaccccttcatacttcaacatatatcttataagagatcatatatcagaataaggcaattttcctacttatgtatgatacagttatatccaagtaatataataacgatttttaatctctaatattcatcagtatatattccgatttcccaaaagtggtctttataacttatctctctatcccaatctgatactcatgaaggaatcacaaggatttggctgttagctctttagttgccttttatgtaaaataatctccctaacttgtgacttgtatcgcactgaaatttttaaagaatccaggccagttgtcttgcagaatgtgttttttgatttgtgtgattgtttcctgatgattagctttatgttaaatgttgagggggtgggggcaataaaactacataattgatgttttgtgtttctcactgcactgtattgggaggcatgtgttatccacttaattattaagtgatattaattttgatttcttggtgtcttaacagatctctcctttataaagggtaccttttcccttttgaaattagttgattacatgtttgaaagtttgaggagttgaatatggtttgaaagtaaatagaacggactggtgtaatttccagtaatgaaacaagctgatttttaacaaataatatatttgattttaaacttacygtatacaaatttttacttgtgtaaaatataatagagatcagattatttgctatgtagaaaaggtttttacaaaagtataaacagacagttcttgcatactttaaaatgtcatttcttgcttagaacaaatacacttaaattctctatatacattattctgtatatacaaaatcaggtattattgatagtttccagcagtgcctgagttttagcagtatgagttctcatttttgtggtatgtagtgatggtgtcttttcttagattactcaagagattaactctagaacaagttaaacctttctctcttcacttgggaaaaaaataaatttaagagtaactagatctgatctttttactatttataatccaaaatttaagcaaaatgaaagaaataaaatagtgattgtaacatccacataagagtgagatccaccacctcatcttaatagtatctttaattggattcaaaatgcatgcatgtgtcataccacctgaagcaaccatccttcctggagccgtactatccatcaattacaccactagttttgtggcagttctttgccgctagagtactagttttactatgaggctcactctcttaccccactacattctacagggaaagcacattctttttttcctactttttccatgtaattgaggaataaaatctcggttttatatactgttgtttgtgrtcttgttgcttttttttcccctgaaaaatatagttgtacatattgttctgtgaatgttacatgttacatgttttatttcattcatttcttaggctttggggtgagcctgttaatctgcgtgaacaacacgatgctttagaattttttaattcattggtggatagtttagatgaagctttaaaagctttaggacatccagctatgctaagtaaagtcttaggaggttcctttgctgatcagaagatctgccaaggctgcccacataggtaagtactaattacacattgaaagtatatgttgtaccatgtatatactaacagaaataaaatttttactagtacttaacatacaaaagtggagtatatcactgattactaaatacctgaaacagaatgatttatatactttgcataccttactgctgtggggcttttttttgtttttgtcagttaacttttagttccttctactctgcctgatctcttagccattttattatattatactcttacagtctctttcttcctttcctttcctttcctttctcctttttcttttcctttctctttttttttctttctttcttttttgaaagagacaaggtttctctttgttgcctaggctggagttcagtggcatggtcgtaactcatagtaactttgaacttgtgggctcaagcaatcctgctgcctcagcctctcaaatagctgggactacaggcatgtgccaccacacctggctaatttgtaaatttttttagagatcgaatctcttgttgcccaagctggtctcaaaactgctgacctcaaaatcagtcgtcacacctcaacttcccaaagtgttgagatgacaggcgtgagccactgcgcctggcctactcttacattcttttacagaagattattcctgaggaaataaaatggcattttgcatatagctacaggtgttatttataaatttgccctttatcttagaacttgagtgattataatagtgtaaatacagtaagtttagaagatgacaaagctatggtagtatttcctatacaaatgaaataatgacttttaaaatagcattgattattgtcattatctttaaggtatatttgtatacaaaacatatcaaacctattgtaaaaaaagattttacccccgtccgggaggtgaggggtgcctctgcccggctgcccctactgggaagtgaggagcccctctgcccggccagccgccccgtccgggaaggaggtgatggggtcagccccccacccggccagccgccccgtccgggagggaggtaggggggtcagccccccgcccagccagctgccccatccgggaggtgaggggtgcctctgcccggccgcccctactgggaagtgaggagcccctctgcccggacagccgccccgtccgggagggaggtgggggggtcagccccccgcccggccagccgccccatccgggaggtgaggggtgcctctgcccggccgcccctactgggaagtgaggagcccctctgcccggccaccaccccgtctgggaggtgtactcaacagctcattgagaacaggccatgatgacaatggcggttttgtggaatagaaaggggggaaaggtggggaaaagattgagaaatcggatggttgccgtgtctgtgtagaaagaggtagacatgggagacttttcattttgttctgtactaagaaaaattcttctgccttaggatcctgttgatctgtgaccttacccccaaccctgtgctctctgaaacatgtgctgtgtccactcagggttgaatggattaagggtggtgcaagatgtgctttgttaaacagatgcttgaaggcagcatgctcgttaagagtcatcgccactccctaatctcaagtacccagggacacaaacactgcggaaggccgcagggtcctctgcctaggaaaaccagagacctttgttcacttgtttatctgctgaccttccctccactattgtcctatgaccctgccaaatccccctctgcaagaaacacccaagaatgatcaattaaaaaaaaaaaaaaaagcctaaaaaaataaaaataaaaaaagattttacaagaaaaacattgacaaaacaaattgtttgacttgaaaattgattaagggcttctattagaaatagttaatgagttcattactgataaatatacatgcctgtcatatggaagttttactttgggacttgttataatatggattaatgttgatttgcaatcgtttttcaccaaaatgtcacagtaagatagtattttctacaatccaaactgtattaaatatagtcatgggttgagtacacatgtggtttgtgggggtgttttgtttttgattaccaggaaatgattgggygagaggtaatactatataaatgagaaatttctagcaagttatagtcttaccactcattcataattagggaatatacttattcacttagcctaggcaacttttagtccttttgaaaggccttttatattaggtgaacaataaaataaaattttaaccttgtttttaattagtgataaaaacagccaactttggggtcatttgttcatgttactcctccttagttttagacaattttctaaattatttggaaatcactggttttctttggcaagtgaaatgtcaaaagattatggtcttgaaatcagatccttatacctgatcaacagctaaactagtcttatttttttaactagctgggcatgggggtggactcctgtagtcccagctgcttgggaggctgagtcaggaggatcgcttgagcccaggagttagaagttccagtgaactgtgatcatgccactacattccagcctgggtgacagagtgagacctcacctcattaaaaacaaaaaagaaagaaactctactttgagtgcccatacaaccattctgtttttcactctcagtacagtattcattgaattacatgaatctttgtgttacaagattttgcccaactgtaggctaatataagtgttctgaacacatttagggtaagctaggctaaagctatgatgtttggtaggttgggtgtattaaatgcattttcagcttatgatattttcaatttatgatgggtttattgggctgtagccatttcataagcaaagagcgtccgtacttgctgcagagaccatatgcttcacaaagcctaagataaatttactatctggccctttacagaaagactttgctgtcctctaatgttagaacaccttctttttatagatgttgaagaatatcctacttttgaagtgtagtctaagatctaacttttttccctctatgggctgttccctgattatatagtaaaaatttgcttaatacctgctttatattccattcatataatttataaatgcctttgtgtaccttttttccggagtttaaaattccttaaataagggactatcttaaacagtgaatatccctcagtacttttacacatagaaagcactctcagtctatccattggatgaattaatggttaataatgtattcctcacatcccttgttttgcatttatgcatgtgtctcaccagaaattggaaagtctctttggtagaaaatgaccataaactgggattctagctccttctcaggttgctaatcctgtactcatttgtgtgtgcaaacttttgctttactaaggcttccattacagaaaaggaagaatatataaaaatttagcttattcgtagtttatcattttcagaacttaataaattcatgctttggcttcagcatgaattactatctaaacagataacactagaagcagcatcgtatactacaaagagattaagctgtgagcccagacagattcaactttaaaataccatttcacctaataatcttgatcaagttaacttttttattgctaacattctatgacttacgggtttcgcattataaaaatggcaaatgtatgggtgcagcaaaccaacatggcacatgtatacatatrtaacaaacctgcacgttgtggacatgtaccctagaacttaaagtataatttaaaaaaaaaaggcaaatgtagtttacattaagtccataactaaaatgtttacaaaactaagggataaatcctttttttaaatcgtttttaggtacgaatgtgaagaatcttttacgaccctaaacgtagacattagaaatcaccaaaatcttcttgattctttggaacagtatgtcaaaggagatttactagaaggtgcaaatgcatatcattgtgaaaaatgcaataaaaaggtacgggctgtccagttttgtttaattttgattacatttaatggatttagaagaaattggtttttttggttcatcctcacaagtcaccctatttttattttctcctactttggtatagtggtagcagagaagtagtcaatatgataactaatagaaggtttggcaaggaaggaaaaaaagtagtgccaaaggggctaggtaaataagataaaaataggtaaataagagtgaataattttaaaagtcataacgtgatagcacattctcttatataagttacacagacactttccatctctaccgagaaacaaattgccattgaacccctcaaagatacagagctgatagaggaaaacatttctcctgtcatgtccaggattacttgtcaagaccaaaacatttgctgaaaccattaattactttattgaaccacataagatttcttttagactagtcaagtggcccataagatttcttttatcacctatgttataaaaccatttattttggaaacttattagcagttctttgagagagatgattcacacgcattatagtaatgaataaggtgtatctttgggagctcccaaaccctttcaccctcaagtcacttgtgttgttttggccttatgcaccacttagagaagtcctgaagtttaaagattgagattgtgggctgtaaagccatactgcctgccacctgcagctcctgagacctgaggcaagttacttgacctctctgtgattactagttttcatcttttaaggttcagtagtacacacttgagaaggttgtaaggattcggtatgtttttacttgtgcggcacttagtatatattacctggcatctgaattacccaacaaatattagctactcttattgttattgtagttctttggtttgtgcataggaaaccaccttcgtgggaacaacagtaaacatcaaacaggtaataatggctagataacaatgacagaaaccagtcaacaatttaccatttgcatattattaatttcagcatttaaatcagctgataggattatcttgattatgctcattgtcatgtatttgtttatacttaaaaattcagataagtcttaatatcatttaaaagtttgcttggggtttttttttttttcctgtggattttaatagaacatctggtaactttgtcttgtttattttaggttgataccgtaaagcgcttgctgattaaaaaattacctcctgttcttgctatacaactaaagcgatttgactatgactgggaaagagaatgtgcaatcaagttcaatgattattttgaatttcctcgagagctggacatggaaccttacacagttgcaggtgtcgcaaagctggaaggggataatgtaaacccagagagtcagttgatacaacagagtgagcagtctgaaagtgagacagcaggaagcacaaaatacagacttgtgggtgtgctcgtacacagtggtcaagcgagtggggggcattattattcttacatcatccaaaggaatggtggagatggtgagagaaatcgctggtataaatttgatgatggtgatgtaacagaatgtaaaatggatgatgacgaagaaatgaaaaaccagtgttttggtggagagtacatgggagaagtgtttgatcacatgatgaagcgtatgtcatacaggcgccagaaaaggtggtggaatgcttatatacttttttatgaacgaatggacacaatagaccaagatgatgagttgataagatatatatcagagcttgctatcaccaccagacctcatcagattattatgccatcagccattgagagaagtgtacggaaacagaacgtacaattcatgcataaccgaatgcagtacagtatggagtattttcagtttatgaaaaaactgcttacatgtaatggcgtttacttaaaccctcctcccggtgagtatcaagagagtttagcttcttagtaataaagaataatttatagtaggcrtcaacatgtttaagttcataaaattaatgttttcactttaaatgagtctaatttgctgggtgtggtggttcacgcctgtaatcccagcactttgggaggccgaggtaggtggatcacctgaggtcaagagttcaataccagcctgaccaacatggtgaaaccccatctctactaaaaatataaaaattagccaggcatggtggcatgcacctgtagtcccagctactccctgtagtcccagctactccggaggctgaggcaggagaatcgcttgaacctgggaggtggaggttgcagtgacccaaattgatggccactgcactccagcctgggtgacagtgagtctccatctcaaaaaaataaaataaaaaaataaatgggtctaaattaaagtagcctgagaagggttcttaacaaatttaggacttctcaaaattaatggaaacacagacttgtttgaaaatggggttggaaaataaaaatgtgtttttatatctgcattttatttatagggcaagatcacctgttgcctgaagcagaagaaatcactatgatcagtattcaacttgctgctaggttcctctttactacaggatttcacacaaagaaagtagtccgtggctctgccagtgattggtacattgctttggattttcattcctattatactaatgtttggtttgcttctttaatagattgctttatgtttttctaaaccaagagaattttgtttgaagtttggaatatagaataaaaactctgggtcacaatagagaaatcatattaaaatagttacttagtctaaacatggccttttgttattcagaagctgacttctgcttctattaccttgtatcatatctttgacatccctgcaccaaagactacaagctgagactgggggacagtgactcacacctgtaatgccagcactttgggaagccagggtgggaggattgcttgagctcgggagttcaggaccagcctaggcaacatagtgagacccccatctcttcaaagaagattttaaaaattacccaagtatggtggcgcacacctgtaatcccagctactcggaaggctgaggtgggaggatcgctggagcctgggaggttgaagctgcagtgagccatgactgtgccactgcactccagcctgggcagcagagcaagaccctgtctcaaacaaaaccaaagattacaagatgagactgaaaagtgtaagctacttatgaaatttattaggttttagcttacctagattgaattctgacaccgattaaaagggtaaaaaattaaaatggttttcttaagtttctaattgtgaaagtatagaggccattatgatacattgatttaataatttttacttactcatttcaggaatatgtcaagataagggggtggtattttgtcattgaatctaggaagagtttgttaatggatttttagaggacaagctttcacctgtttggtaactctgagagaatagaccaagtcatagtatttatctattgttttaatattagaagcaacctttgctggttctctccagcagtagaggaagatctttgtcttttttttttggttcaatgagactcatccttttactatagagaacaagttattgacttaatagtcataggtttttttgttttattttaggtatgatgcattgtgtattctccttcgtcacagcaagaatgtacgtttttggtttgctcataacgtcctttttaatgtttcaaatcgcttctccgaataccttctggagtgccctagtgcagaagtgaggggtgcgtttgcaaaacttatagtctttattgcacatttttccttgcaagatgggccatgtccttcaccttttgcctctcctggaccttctagtcaggtaattgcacagctttctttctaaatgatgagatgtttacaaataaattgtgtttcctggaagtcgaagtcacaagcatatgtgcatccacttgatatgtttacctaacagaaacacacaatatgatgtcagtgagttccatttaatattactgcatggcaatgaatagtaattattggctctttaaaaatgtaagagaattttctctgttcggttacatgcagtagcttaattataagtttactgttaagtagattttttcctattttgaaggttttttaaatagtcttagatttttttaaaaaattacaagtgtaaaaaattataatgaaatccgcctctgatcttcattccctttcccaagaagcaaaatagtttagtttgtgtgatcagtccttccataaatgtatgcctgtatcagcatatgtgcatgtcctttttatgcaagtagaagtatacatataccttgttgctgtaaaacaggtaatgttttatcctttacaggcttatgacaacttaagcttgagtgatcacttactaagagcagtactaaatctcttgagaagggaagtttcagagcatgggcgtcatttacagcagtatttcaacctgtttgtaatgtatgccaatttaggtaagaatttaagtttttcagaattctgttttgatgtatcatattaaattgtgaagtcatttaggtcaagtgatgaaatataatctgatctgaagtagaaacaatttcccataaaacctgttgtgaattttatctgaacatggcactttcaccttttactttgtttatgcatgtgtctttgtggtagacacaggtcagaatctgtgttttgatttttttttttttttaatctcctaatgcagtggtgccaaatctggctgcttttggaaaatactggtttctaggcctcttctcacactgattgaatcagcatccccaaagctaatgtcagggaatccatgttttcaaaggggtccccaaatggttgtgatactcaccaaatttagatagcagacttggtctgtacataagtttttgtttaagtaaactacaattatggataatataaatactcgcttaaaatattaatttaggggccgggcacaatggcttatgcctgtactcccagcactttgggaggccaaggcaagaggattgcttgagcccaggagactaacctaggcaccatagggagaccctatctctacaaaataaaattttaaaattagctggatgtagtggcatatgcctgtagtcctagctacttgggaggctgaggtgggagaatcacttgagctaaggaggttgaggctgcagtgacccgtgattgcaccactgcactccagcctgggcaacagaatgagaccctgtctccaaaaagcaaacaaaccaaaaagtcatatatccaaaatgaagttctatatccaggcgtacctgtcgtttcaggttttttttctgtgatcttacttaatcaccattggatccatggcccttttaacataagggagattgtacttttcatttgtctatttagtttgtcttcttttcccttgtcttttccgtaattgcagatatttgggtatttgtagatgagaaagagaatatttattacacagacaagcataagtggaatctgtatttcaaacttaaaaatgccaaatttagacattcagaagaatcctattctgttcaactcttttagatattgcctgttcacaaagcacacatcattgttccataatgtaacctacttgtaaaattttcctgctgaaaacaaatactgtagggcctgtaaaccttaatatgaagtccttaagatcagatatgcattgggattgagaattgtttggatttaagaaaagcaaggcagtgcatataccaacatctctatagcagggtctgagacaacaacttacaattgaacacattaatatttctacagtaaaatatgaatatttatactgaagggagaaataaagactataagtagcctttagtcagtttgggctaggttatcccaccaaccacattttgacagcaacttaatgaaaaactttgttgggctgggcgaggtggctcatgcctgtaatcccagcactttgggaggccgaggcaggcggatcacctgaggtatggagttcaagaccagcctggcaaacatggcgaaaccccatctctacttaaaaatacaaaaattagcagggcgtggtggcgggcatctgtagtcccagctattcgggaggctgaggcttgaatctgggaggcagaggttgcaatgagccaagatcgcgccactgcactccagcctgggcaacagggcaagactccgtctcaaaaaaaaaaaaaaaacttgttataataatagcttttgggccaggcgcggtggctcacgtctgtaatcccagcactttgggaggccgaggcaggcagatcacaaggtcaggagttcaagaccagcctgaccaacatggtgaaaccccgtctctactaaatatacaaaaattagccgggcgtggtggcacatgcgtgtaatcccagctactcaggaggctgaggcagaagaatcgcttgaacccagaaggcggaggttgcagtgagctgagatcacaccactgcactccagcctgggagacaaagcgagactccatcttaaaaaaaattaaaaattaaaatagcttttggaatcttaggatttcagataagaggttgtggacctgtttttattatgtttttgggaatatggcaataaataagattgtctaatgggatatagaagcaaataatgtagttgccataaaatatgttaatagctataatagggaaaatgcaaagtgcatcacggggggcatggtacctgaagggatttggggagtgcagaagacttaatggggaatgtaacgtgggaattggttagttgagctttccatctagagtgtgaacagcagatgcaaagacttgataaacttggcgtggcttattggatgggatgaaaattgtccagtctgactagaattgatgtaagatgggaatggcaggagtttctgatcatgcagttctaataggccttgtgagagagactgaggcattggatgagccattgtagggttttgaacagataataccatctagaaagagcactgtggccacagtgtggaatgtattgcagtggagtaagatcccagagagtgttaaaatgatctatagacataagatcattgtgacctgtactggagaactggcagtgagggagatacaagtggacagatagatatatggtgctttttataagaagtggaatcagtggatttggtgatgggatattcagagaaggaggggacagggaagagatgtgaagaatgatgcccaaaattntaacatgaacaactgtgagtggatagtggtaccatttactgaggggaaacacaggaggagaaacatgtatgtatgggaagaaaggggtgagttcagtttgggtagattgagtttgagcctgtgtgacacccaaatggagatatacagtagaacagtaagtaatttgtcttgaaatgtttttgaatcatctgaatgaagatatctagaacattaaagccgtgagcgtgggctagatcatccagggaaatcagtgtgagaagatagcstggcatgggaacttggagaaacatcagtttttaagagacaaggaggagtcgcaaataagaacaaaaagaggtagaaagaaaatcaggaatccagggaggaagaagtggttatggtttgagaactgctccttagcttattactgtgaagaggggccaaaaccaaattggcatgagttgaggaatagaaaatgagaaagtagagagaccaaatgtaggtatctttttcaagaagtttggctgtagaggaaagaagagaggcaggcaatttataaaagagtttttgcttctcatttaatgtagttattttgttgttttcatcctccttacaaatgagggtygcagtgttggttagtccctttagactctccaggctgtagaaagtgttcgtcttctggtcgggcgtggtggctcataatcccagcactgtggaaggccaaggcgggcagatcatgaggtcaagatatcgagaccacccaggccaacatggtgaaaccccgtctctactaaaaatacaaaaattagctgggcatggtacgtgcctgtagtccagctactggggaggctcaggcaggagaattgcttgaacccgggaggcagaggttgcagtgagctgagatcatgctactgcactccatcctggcgagagagcgagactgtctcaaaaaagaaagaaagtgttcatcttccttacagtgagccggtgtgattggaatgtcatagtcatagtcactgttgaacaatgttaatacttatactcaatgggtgagttttcttttctagtaaaataattctctgaatgctaagtaaaagtgataaaattacaaatcaaaatttttctgatcataaaaattatagacaagatattttgtataactacttgttttattcatgaagcccttgccatcttaattttttcctcatatttttctccctctctttcttctccccttcactcctttttgttgtaggtgtggcagagaagacacagcttctgaaattgagtgtacctgctacttttatgcttgtgtctttagatgaaggtccaggtcctccaatcaaataccagtatgctgaattaggcaaattatactcagtagtgtcacagctgatccgctgttgcaatgtctcttcaagaatgcagtcttcaatcaatggtaaatttgaatgctccattctttacactagttttgtttgtttgtttgttttgagacagagttttgctgttgttgcccaggctggagtgcaatggcgtgatctcggctcactgtaacctccgcctccctggtttaagccattctcctgcctcagcctcccaagtagctgggattacaggtgcccaccaccacgcccggctaattttgtatttttagcagagacggggtttcgccatgttggtcatgctggtctcgaactcctgacctcaggtgatctgccgtcctcggcctcccaaagtgctgggattacaggtgtgagccaccatgcccagccctctttacggtagtttttaaatgctgctgggcatatatagtactaagagtctggaggaagatttttgctttggaatattttagccctgtaccttttttacgtgtttaatgggggtcttttttctgtctccttgtgactgaggttgataccatgtttatgaaatagtttaagaattaactttttaggctgggctcagtggctcatgcctgtaatccctatgctttgggggaggccaaggcaggagaakcacttgagctgaagagtttgagcctgggcaacatagcgagacttcatctctactaaaaattaacaacaaaaaagttggctgggtgtggtggtgtgcacctgttgtcccagctactcaggagactgaagtgggagaatcacttcagcccaggagatcaaggctgcagtgagctgtggtcatgccactgcactccagcctaggtgacacagtgagaccctgtgtccaaaaaaaaaattaactttttatatttagattttgtatttttatatcttggtatatctatctgatcattataatgcataatgttactttcttcgttgtgcttaggtaacttgatttaaaatgttatttctctaaaataaaacatttggccagacatagtggctcatgcctgtaatcctagcattttgggaggccgaggtgggtgggtcacttgaggtcaagagttcaagaccagcctggcaaacatggcaaaaccccgtctctacaaaaatacaaaaaaattagccaggcgtggtgacgtgcacctgtagtcccagctactcggaaggctgaggcaggagaatcacttgaacctgggaggtggcggttgcagtgagctgagatcgccccattgcactccagcctgggcgacagagcgagactccatcttaaaaaaaataaaaaaaaattataggctattttctatcgtgaaagttgtgtattattattgtgaagaagcttattagttttttattggtgacaaatctgtattctaggtaatcctcctcttcccaatccttttggtgatcctaatttatcacaacctataatgccaattcagcagaatgtggcagacattttatttgtgagaacaagttatgtgaagaaaatcattgaagactgcagtaattcagaggaaaccgtcaaattgcttcgtttttgctgctgggagaatcctcagttctcatctactgtcctcagtgaacttctctggcaggtaaaaggaaaataacatttgtatgtttataatttgatttgttattcctttcattaagttactcaccatgtcttacttgtttttaggttgcatattcctatacctatgaactgcggccctatttggatctgcttttgcaaatcttactgattgaggactcctggcaaactcacaggtggatactctttttgtgactggaaacaattaggcttgcccaggtgttagagttaactgaaattgacagtcaccacattttttttaacctattggagttctagtgaatgttttatcttaaacctaggacaagggtaaataacasgttctccccttttcctcagaattttatttccttttttattcttttttctcactgcctaagtttcatacttaataagcctgtttctttagaatgacttttttaattaaggaggagctagcttgggcatttggtaaatatttgaatttcattaatgatgcccgaggattattttatgattatattacatttgttttagaattagtcacttgaagcaacttagtcattagtcacatgaagtataatagtatatgtaaaaagtcttcaggtaagtacggtttccatttttcatggtacttatattctgtaaagtcaccacagacactgagttagcaaatactgaaccattactcctaggaggaaatacagaattaggtttctataagcctctgtttacatttttatcaaccagtcaatacataaccttgttgtatgtgtgtttctacttaaagtcatttaatatattttgttgactcataaagttcacagccaacagctctgtaacttaagcctgaacttaagcttctcaatgcattctgcataaggcacatcacagccttcttgtggttaggaacattagatagcacttcaacattatatacttgggtcattttaaacataaaaataaccagcaaaagcacaaatatgtggaaaatgtggcactaaatacaccatgaagaaggacacttgtttacagtttaagctgaaacaagagagaatgacactcttctggacttcagctaggaacgtttgtgttggacaacttgatatttttgctgctctgtatatgtccacagatgacgaagaaagcaccttgatgattgattttgcagttataaataaagtttaggaagtaagcgaattcacaaatgtggaattcatgaataatgaggggatcaattataattagtttttatgagaacttttagaatgttaacttttttcccccgtaaaaactaaggttatccagcttaactggccctcaaactttcactagaatttttctatttgtttttgggggtttttttgtagtaaaagttgaatatattatctttaatcccaagagttatataatagatgataaattatggtattagttgacagcactgccaggttttagaacttcccttcccacatggaagatagtataatagtttgtttgggaaaacaattcaaagtctatgtcgcagtttgcctcccatctgccaaggtaataaaacaaacttaaaaacaagttctgtaacaacaaaatgcttaaagagaagtaacaatctggagttttagtggggattgcgaaagccagaatttgcaacttagtattttcaaattatctccaaatttaccataatagatttcaaacaaatactgtaaaaatagcattaaaccaaaaatcaattttcgtgagacacaaaagatagtagctcagaattatagtcgtttattcaggcagtattcagtgcccttctaaatatgttcataggatttgaaagcttccttcagagtagattttaatgaaatctaacttttactattttcttttttaaaaatgctgtatttctgggcacagtggcttacccctgtaataagcactttgggaggccaaggcaggagaattgcttgagaccaggagttcaaggccagcttgaccaacatagcaagatcttgcctctatttttttaaaaaagaaagtactgtaagcacttacagttttaaaccagttaatcacatcttagctcttgtttgattagagcaagtgataatggcaaagacatacgtgctagattaaatgtgggaattacacttttgtgtaatgagattagtaagatactgttaaatgaatcactggcccaaacgtgaaaataattttctcataatgagcttttagttcattcagtaaacaatgttcaaatatttatagagtgtctaccatgtgcccagcactgcttggcatcaggtaataaggcaagtgaagatagtattaataaaaatggcatttgagagcagttgatgctaatggggagaaaatatgatatggcagaaataatgatttagcacttcattgttacttgaaaaaactgaaggtaaaagcaatttatatgtagtgtttcagatgaaacagcaagagggcctgaacatggttgatttgtctgaaatgattaagctttgcaaaattgttgaagtaatctgttttgtttggaaatcatgaatgcatttgatggaggaaaaaaatcttactttgactttaaacatactgttaagtaaaatacatagtgtatattagaatctttaaattctcagtgtccaggttatgttttctaattgaggtaaaatttacataacaaaactcaccatttcaaagtatacaattcagtgacttttagtacattcacaatgttgtatagccattaccactatctgattccagaacttttttttttttgagagggagtctcactctgtcacccaggctggagtgcagtggcgcgatctcggctcactgcaagctccgcctcccgggtttacgccattctcctgtctcagcctcccgagtagctgggactacaggtgcccgccaccatgcctggctaattatttgtatttttagtagagacggggtttcaccgtgttagtcaggatggtctcgatctcctgacctcgtgatccgcccacctcggcctcccgaagtgctgggattacagatgtgagccaccgtgcccatcccagaacatttttttttattaccccaaaaggaaacccctacccaattaagcagtcactcaccattccttctaaccctggcaaccactaatctgttctctgtctctgtggatttgcctcttccagacatttggtaaaaacgaaatcatgcaatttgtgtgtctgacttctttcacttagcttaatgttttcagagtccatccatgttatagcatgtatcattactttatagctgaataatattttgttttatggatatatatacaccacattttatttactggcacataatctttttaacacaaaagaaacaaggcatgtttgtgcccctacaatcatgttttaagttagttagttcagggaaagacaggactagttggctttgtattattactctgttgtagtttgggagaaactgaaatgaaatcctgtgttattggcaaatcagccaaattgtactattgcctgtcaaaatgctttgcctgccatgtattctcattattagaattcaaatactgtacctccaaattatgtcactgaatcctaacttgccttcagagatgcagttttrtaaaaggtattgatgtgtagcaaattaccctcaactacagcagtcataaacttagttataacttttttaaagtttgcattactctcgagtgtcctgaattcacttcaggtaatgtgtttaaattacatatatggcagaattattttggactggtaataagttagtaagagcacagactctggagtcacactgctccgcagctatatgacctcggcaagctgtgtaactctgtgccaattttctcacctgttaaaagttttaataataaggccaggcgcagtggctcatgcctgtaatyccagcactttgggaggccgaggcaggcggatcacgaggtcaggagattgagaccatcctggctaacacggtgaaaccccgtctctactaaaaatacaaaaaattagctgggcrtggtggcacgtgcctgtagttgggctgaggcaggagagaggcgtgaacctgggaggcaggacttgaagtaagccgagatggcgccactgcactccagcccaggccgtctcaaaaaaaataaataaataaaaaataaaggtttaataatagtacctattgtctaatgttagattaaatgactaaaagacattattgagtggcacatagtaggcactcagtatatattagctattagattttagatgtttttattttatatctggttctctttcagaattcataatgcactgaaaggaattccagatgaccgagatgggctgtttgacacaatccagcgctctaagaatcactatcaaaaaagagcataccagtgtataaaatgtatggtagctctatttagtaactgtcctgttgcttaccaaatcctgcaggtgaggatttttttcttataattttgtagaaatcttaatcagaattaaggattctgttttaaaagaagagaatcatgagaacttggggttgtcattttaagttaactttgaagtattccaaatcctcttatctatatggttttattttcttttgcagggcaatggagatcttaaaagaaagtggacctgggcagtggaatggcttggagatgaacttgaaagaagaccatatactggcaatcctcagtacacttacaacaattggtctcccccagtgcaaagcaatgaaacgtccaatggttatttcttggagagatcacatagtgctaggatgacacttgcaaaagcttgtgaactctgtccagaggaggtaaaaaaagccaccagtgtgcagcagatagaaatggaagagagcaaagtaattctttattttataggccagtgtttatgtattaatgatattattaaaagattatgttgaagttttgggttttgaaaaatgtttattcggctgggcatggtggctcacgcctgtaatcccaacactttgggaggccgaggcaggcggatcacctgaggtcaggagttcaagaccagcctggccaacaaggtgaaatcccatctccactaaaaatagaaaaattagtcgggcgtggtggcaggcgcctgtaatctcagctacttgggaggctgaggctggagaatgacttgaacccaggaggcacagattgcagtgagcggagatcgtgccagtgggctccagcttgggtgacaagagtgaaactccatctcaaaaaaagaaaagaaaagaatgtttattctatgtcattttaagctaatgaagggagctttcttttggagaaatttctgtgaaattgcctgaaatgtagtagttctgagagaatgcaaatcaggttttttgttttgtttttttttttttgttttttccccaagttctttatctgcagtaaaagaaaagttgctaatgggtcagttttgtagatttttaaaatttatttcaaatagaaaaagttaaaagtaaacttgagtttgcctacgtaattttttatcttgaaatattcaaaattaggagccagatgaccaagatgctccagatgaacatgagtcgcctccacctgaagatgccccattgtacccccattcacctggatctcagtatcaacaggtaaacaggagtcagtttatgcttttatcccctagaactgggttttatgcttaattttagaggatggctcaattgtttgttgtgactacaaagtamgaagtaggattatctagactagctttgggagcatgatccagaagagggatggtttggagtgggggtcatggtgtaacatgtttgaacttaaccactgtagggttttccttgtcaagaaggtgtccttcttgtgctagtagttaataaaactgtatgagaatttatatcaacataaaatgatcattgtttagtgcaaaggattgtggtgacatttccggtgaggtaaaatcttcacctggattccaaaaacattattaagatatggcaatgaagtaagaagtccttggttacttagccacaggtttcagtgatggtaaaaatcactggaaaaaaaaggatttgggtagatttccataggtgattaaagtaaataaactagtaaatagcaaaagaaatgagatgaagaaacattctaaatgataactttttctttctgaaaccaaaatgtgactaaatcagctcttgkgaggcagtggtactcaaacttgcacaggcgtgagtctccctggaaggsttgctccagcagagagctagatgctaccctaaagtgtcttatttcataggtcttcaaggggctggaaaatgtacatttctagcaagttcccaagtgatgctgctggtggtccaggaaccatacttggagaaacatttcaggcattctttcttacatttcactgtgtacatagaagcaaactgaatagttaggaagtacacattcagcgtacttattttcatctatagaaagtaaagcctggccaggcgcggtagctcatgcctgtaatcccaacactttggaaggctgaggcaggtggatcacctgaggtcaggagtttgagaccagcctgaccaacatggagaagccctgtctctactaaaaatacaaaattagccgggtatggtggtggcgcatgcctgtaatcccagctactcaggaggctgaggcaagagaatctcttgaacccaggaggcagaggtggtggtgagtcgagatagcaccattgcactccagcctgggcaacaagagcgaaactcccatctcaaaaaaaaaaaaaaaaaagttaagcctaaaatcttggcttggctgatggagcatgtacagaaaaatgagagcactgtagggttcagacattttaaaaggttaaggaaccaaatccacaaggaaggttaacttcctttgaccctgagaaagctcttatgttaatcatgcctggttactttatcatcttgaacattgttctgtttttartcagcattattgtgagttcagggttactgctcctatatatcttacatcatggttagtcaatcggatttagcatgtggaagagtcaatagatgctcatagatcattctctgaaaattttttaccaagagcaacagtgggttaatcctttatttgccagacttgagtctaaataatttttggcactaaaaatcactttggccaaagatttatgtggacctacacaatcactgctcttattcagggttttggggtttgcatttacactacgtttttcaagcctttttttgtttttgtttttgtttttgtttttgttttgcactatagtagtccaagggtatttacagagtaagtcccaagaataagagtatacatttccagagacttcagaccatgattttgaagttgttttactatgtgaaaagttttaacatacagatcttttctcctttcccagaataaccatgtgcatggacagccatatacaggcccagcagcacatcacatgaacaaccctcagagaactggccaacgagcacaagaaaattatgaaggcagtgaagaagtatccccacctcaaaccaaggatcaatgaaatgcacataattaactggttccatcaagactgtgcacccaggccttacagtccaacctttttctgtgtctggctaatatttaaaactagaaaaactattcctaatcaacatggagtggagagtttattcactgtcttatctgcagaaatttgctgtcaatatrtaacccgcctgcagtggaaagtgtatagtgttttgtaataaatggcctgatgctaatgtgtaaatggcaaaggtgtatatagtatattaatgttgactgttaawtcttaagcaagaaacttttttcttgatgagactcacagatctacacaaactacaaaagttaattttcttgttacacccactgcactctgcaaccagtgttgcctgcctcatggcagttggatcagctcctttacaaaaaagaaaaaaaaaaaaccaacagcaacaaaacagagcccatccatgtcagccacaccaatagtttcatgttaattctttgccactggagtcaattttgctatgagcaatgtaaggctggtaacctttaaattatttggttgatgtggaaaattggtgatgtaacactgtttctagatttttttcattgcctttttattctgatattaggttaatcactttgaagctatagttatgctgtaacatttagcatggcttcacaccaagttagtgtagccaatgaggaaaaagttaccataatgacagcagttgtccgagaagtgacagctgtattactcagagcttttacttcttacacctagaatattaaaatataaaacaaggggagaaatgtgacagtctattttcagttgcacatatgttccttatatataatgtttgacagttcaatctctgggtggaataaagaacacttacgtatcagtaatgggaatttttaaagatttaaaacaaatatgcaaaaatttgctatgccaagatgctggagcataatataagactgtatttggtgtgcttgttttgtttctttggtagagtttattaggtgaatcttctaaaactttccttctgttggatcccagtgacgtggaagtcatcagaaccccacrgtacttggagtacctctctgcacmaagatagctggctgattttctgctcagtcacaattttacttgaaagcaagaattgtcctagctccttttccattattccaaaacgtttaacgttcaaagcagggtctcattaaaaaagaaactactggttgatataattgagatattacaatttcagaataaacatttgattaaaaataaggaaatcctcagttcatactgtatttaaaagagaattggtaacttgaatgtgtgtaattttttggaacctgtctaaaaaccaaatacccctgcaaacagatacagcccaccctattctatttaaatattttgctgttttattttatagaaattattttgctgaattcacaaatagaatttgatttaagaagaactttttgtcctgtggtgtgtttttggttttttttttggttactttttttgtcctttttttttttttttaaaagaggactgcatattaaaattcattctgtgcatagcatgcctaggcatgacactgattcaggatttcagtcacatcaagtttttgtgcacagaaagatttgacctttggccctctactgaagattttgagaaatcaggatgttgacactgtaaaagtttcctaacataatcttgtactttttgtatgttttttatatacatgtatatttaatgagcacaagcttggttgtattttttacaattcagttaatagggaaatgttttgtcaaaaggctacacttggaactgaacaaagcagaaacaaaattgagcattgcattattttgtgattaaaaggggcaggtatttaagataaagctttgggtatcttatttgtagtactgtatagtcaacctgtgcttctaggtgttcctgtaggacattttgacaccgatactttgagtgaaagtcacacacggtgtttgcaattccaactgatttttgttttgtttttatttttttgttgttttcttctttgagatggagtcttgctctgtcacccaggctggagtgcagtggcacaatcttggctcactgcaacgtcgcctcctgggttcaagcgattcttccgcctcagcctcccgagtagctgggattagaggtgcccaccaccacgcccagctaatttttgtatttttgtagagacagggtttcaccacgttggccaggctggtcttgaactcctgacctcaggtgatctggccgcctcggcctcccaaagtgctgggattgcaggtgtgagccaccgcgcctggccccagttgatagtttttttaatttaaaagttcctcaattccaagctctttaaacgagtgaaataggttaactttatttggatgagttaggtgtaccatctcaccatctgagaggagatttatatatttcctgctgctccttaacaaaatatgtaatgtacttaaaaactttaacgacttcctagttgagagaaaacttgacatataaaaggctgtgaatttttctgcttggaggaagagcccaaccttggttgctttgaagttacaagcccccttgtgccaggtgaggggcttgtgagtcatttttgtctccatttgaggaagagtggtattcgttgtgactaggagcaagggaaagtggagttatttttgtttgtgcaaattattttctatatttaactcaagcattaatgtataaccagaaatttaaagatgcatgttgttgcaagagcaacataatggtgattttgaggtctttttctgaacacaagtggcacattttaaatttcaagtcttcaaagtgcctaaggattatttagttctccctcaactgattttttgagccatatatttcctattttaaatgtttgcggaatcgccagtcttcctttgaaagaaacagcccccagaattctaaatgacacgattatagaagacagtagaatgtgttaccataaagactgaagatattttagttgtaaaaccatgtgaacaagggcttttgccctattgtatctaagtatttcagtgcacaacttgttaaaccatgttgctgctgtttctaagccctccaccaactgaactttcatgtttagcattgtagaggcagaaataacatactaggttttttttttctttcattgatttttctcctggtgataatttcccagccttgtgtcttttagctgttgtgtatacaaatttagaattaaaatgttttctatttttttcatgattaacttagtgaataacttaaatccttaatcctcgtagtggttagaaagatgaggagacttttttgacttacatttgtaaatgaaaacaagtctgtgaatattcagatgactacttcgaagtaattcagtttttttattagtatttttccagcttatgttttcccatgagctattttactttgctgaattttgtgggtaatttggtggatatatcctgccttatttaggattatagctggataagaaaattgccttttcattgtaagtgcccagttttggtctctagtttgaaggtactacatactgccgataaaggaaaacactcccctacaccccagtttttgtgttaccaagaaaaaaaaaacagtattggtttcatagtaggactcaaccagaattggtcctacatatatgtgagtgttcagtttttgcaaataaggtttttgagtgtgataaaacactacagaagtgctaagtgtattgagaatttgctgctgattgtatttataacaattacttgacgtttgcagaaatttmgcactttccctccaaatttataggtgtaagagaagcgggggcaaggtgcaccacattttaaaactgcaaatgtgtgaaaatttatttagagattcagattcctaaaaggaaatttcaccacccaagtcatgcacttcttagccttttacaagccaacagactgacatgaagattgttcacagttcctaagatttagcacatatacaaaaataaaactttataaattcaatttcggttttccctttatttattaatacaagatttctaaacaaggtagatgtgtaatagagctgaagggaattttttaaagggaaatgtttatgaggaattcagccatcattgtgtatatccaaagtggattcacacctaaggacctcaaagaaatgagttgtgatctaattgcagactttagagttaaaactaagattcagcaaactgtggtgtttcagttctcttaaactggaaataaagcagaccacatgttttgaggggagccacagaagtgaaagttaactctctagcaagttccatctgctgttttttagtgtctagaaatagctctttgttgtcatgtcccagggaaattaagatttcctcagaaacctggaggtgctttcctaaagttgggttacttcaagaactgctaaaagacaaatctcagattttcactggatttaatttcactgatttttttaaatagaaaactaatatttaacttttctgcaatttggaaaactccctccagttggattagactgtattttaagtatttttagctacatgagtacatctaactgaaaatctacatcaccaccaatattttgaattgtttcttgtaatctggtaacttagagataggcaaaaagttgacatctttatttttatctgtacctgaaagtttagatactcttactaaagttggggttacataaaacgtttcagtaactttagggaggtaaaatctcaagagaaatttcttaaattacaccaaaaaactttcctaaatagaacacgtttcagagccatttaaataaaggttgattattttaaggtcattctatttaaatggtcaaaactcaagagtaaaataggaatcattttagccatctgagaaaacaagtctcattctgatccattaacattagacaatatactgcatttcaacaaatccaagatgccattggttacaaggcgcctcagcaagcaaaatcactgactttcatggatattaaaacgtggggtatcccatctggtagtaatccttgtcatgacaaacgtcttttcacatctggaaataggtttttgtagtgggcttttctcacattgcttttttttccattagtggaacgaaccctattagaaaccctatttttatgtgtaattgctaacaaagctggccaatttacaagtttatgaagaaatggcttgatggaactgaacctttgaggagtcaccgaattattaatgaagtgccctgtgtaagcggtcttcttgagatagttttgtgtcgtagcttctggttttcacatgcattatagttaagacaccaagtggactttcttgctctgccagtatggttcagctgccctggactagtctctgcctgtcaaagcactccctatgttagaaaatgagtatagaggccaggcgtggtggctcacgcctgtaatcccaccagttggaaaggccgaagcgggtggatcacctgaggtcgggagttcgagaccagcctggccaacattgtgaaaccctgtctctactaaaaatacaaaaattagctgggtgtggtggcgcacgcctgtaatcccagctactcaggaggctgaggcacgagagtaacttgaaccagaggcagaggttgcagtgagccgagatggggccactgcactgtagcctgggcgacggagtgaaactctcaaaaaaaaaagaaactggcttctgtagccttcccagcactagccaaactcctcaaaggtaagcaagtgggggccaccttgcaagatagtaagaattgtgttcattttctatttatattcaaccctatagatgtgtttaaaaaacaaaatattccaaataggtactttggatattggaacatttttttccatggagtcctttttagcaattcagttgcatcaggaatagaaatgtattcttaacagtgttgctgctgtgtctcttaaatcacttgccattaattatcttatgttctcatctaattcttcccccacccattaaaacattggtacacctttggagttcagaagtaaggatgattttggctgggtcttaattcccatgctgctgggaccagagagaagaaaggatatgcttcatggaggttcagaattgcattcccttctgacccaccaactactgcctgcacgatagctgttaacaagaggaagcatttgcaggatgtcaaggaaatgagtcaacatttagggcacatggtatgttgagggaaagtccttcagaatccattttcctcaggtgtctatatgtttaggatgtggcccttatttcttgatgtaaactagtgttttctgctgggtgattaaggaaacaactttttcaggctgtgtttaaaatcagtcagaaacctagatgggactgcttaaatttggtaagttagtaccattaagttgggtttttgttttgttttgttttgtttttgagacaaagtctagctctgtcagcagtggcgcaatctcggctcagtgcaagctccacctcccagggtcacgccattctcctgcctcagcctcccgagtagctgggactacgggcacccgccaacgtgcccagctaatgtttttgtgtttttagtagagacggggggtttcactgtgttagccaggatggtctcgatctcccgaccttgtgatctgcccacctcggcctcccaaagtgctgggattacaggcgtgagccaccgcgcccggctaagttggttttaaataagctcttaggttgtagttagccttttctattgctccaagattggattttttagttttcattttattttattatttgttttttgagacggagcctcgctctgtcgcccaggctggagtgcagtggcgtgatctcagcgcactgcaacctccacatcctgggttcaagagattctcctgcctcagcctcccgagtagctgggattacaggcgtgtgccaccatgcccggctaatttttgtatttttagtagagacagggtttcgccatgttggccaggctggtctcgaactcctgacctcaggtgatctgcccaccttatcctctcaaagtgctgcgattagaggcgtgagccactgcacccaatccaagatcagaatttttatctaacagaaaaacaaaaaacaaaaattcagacttgcactaaaatggtagcaggtttgccttactaatggccactgaagcttggtttaataacttagtaacgttaagtgctagataaactggatgttgggttgttgtttagcacttatcagcacagcgttagacactgatattagcaggcctggcgcggtggctcacgtctataatcccaacactttgggaggccgaggcgggtggatcacctgagatcaggagttctagaccagcctgatcaacatggtgaaaccgggtctctactaaaaatacaaaaataattagccgggcatggtggcgggcacctctaatcccagttactctggaggctgaggcaggagaattgcttgaaccggggaggcggaggttgcagtgggccgagatggcgccgttgcacttcagcctgggcaacaagagcaaagttccatctcaaaagaaaaaaaaaaaaaggaagaaagtccataaaccccacccatgttcaaggggaggggcatctcacattggccgggcacggtggctcacgcctgtaatcccagcactttgggaggccgaggcgggcggattacctgaggtcaggagttcgagaccagcctgactaacatggagaaaccccatctctactaaaaatacaaaattagccgggtgtggtggtgcatgcctgcaatcccagctactcgggaggctgaagcagg

SEQ ID NO: 94214 - DNA, 58207 bp, Homo sapiens
accaaactcctgacccacagaaattgtgagagataataatgcttattgctattttaagctgcaaagttttggagtaatttgctatgtagcaacagataagtaatacagagagtctctcatgggccgttttcttccgtcttatctgccatcttgccttgatccttccgcttttttcatctctttttcttttttccttgccagagctccccaaacccagtctctagagggaatgctcaaaattactgtatttcactttgcagagtaatttaagtcttcttggtctaaacatctcccatctagattaagcccaagggattccatctttttggaccaaacatacctgttaaggtccaaaacagatattctgtcttcctaccaggcccagtggcatcaggtccagtcagacagctgccagcttgccctaatagaagtagatataggcaaagtactataagagcaaaaaataagaagcatgtaagctgacttgggggcttatggaggaggtaacatttgagctgagtttttaaggatatgtaggagttcatttggtagagaagtgaatgaaagttagttatgcagagtaaaagcaagtaaaaaagctcagaggtgagaaaagttatagtcaattctgagaactttaaatatgtaagggttctgggtgacaacatctattagtgagcttggaagctgttgggggctagataatatcagacattgaaagccacacatatcaggagactacagacaacataaatctctgattcactgacttaaaaataagaacaataaggaatttagtatttcaaataataagcccaaggtaagactgctccaatatcttaatttagcagcttgatgatgttatcaagaacccagtttgcttctgtatttctattctgttatccccagtcttgtacccccatgattataagatggttacagcagctccaagcatcatgtccttaagattacacctggacagcctgggcaacatggtaaaaccccgtctctaccaaaaatacaaaaaactagccaggtgtggtgacgtgtgcctgtagtcccagttactcaggaggcaggaggattgcttgagcctgggaggcagaggttgcagtcagccgagattgcaccaccacactccagcctgagtaacagagtgagacccatctcaataacaacaacaacaacaacaacaaaaagatcacacctggaagtagaaagggggccttctcttctttttcggtcattatataaatttttttaaaaaagaaatgggctcttgctatattgcccaggctggagtgcggtggctactgataggcacaatcataacatgcatccagaggaaactgcaaatataattgtaaggcaagcctttaaagagcagttaaaaacttgttttgaaatacgggtttctagaatttgtttcaacatgttgagttacagcaaatgaaatggagaaatagtctcaatgctttttaactcgccctgctgactggaaaccttagaactcagccttatgagctgttaatcagataagcactgcaggtttttgcaaagaatcatgcttgacaaatgcttgagggcatacggatttattgaaggaagtattgtccaaacaagactgacaaaattttacaaagaaaatagaattttaaaatgttgggattaaaatgtagatcttatcggagtatggcggtgtgcgcctgtaatcccagctactcaggaggctgaggcaggagaatcacttgaacccaggaggcagaggtggcagtgagccaagataacaccactgcattccagcctgggggacaaagcaagaccccttctcaaaaaaaaaggtagtttcttttctgttttgagatgtagttatgaaatgtaaattagaggatgtttcaatgaacttttgaattataagttaatatagtttaaaaaccatatgaattaagtactatttaaaaaataggtaggaattatacttccactcaaaaacaccttgaactcctggcctcaagggatcctcctacctcagctttctaagtaactgggattacagctgcatgccaccacgcccagccccattatgaaaagttttcattgacttatacctgtatcgtttttttctttcaataattttggtatgaatgtatctctttttaagatgaagaaaactttccctagaaatgtcttccctcctccctgggcattcttctcaacagctgacttccctttcatattattagctaaaattgtaccatatgcccatttaaaccaatattttgtgagggtatgggcccaccatgattgacttagacaatcacaatttatctcctgggactgaggttggagcctagcacccttcaagcacatggccaagcatattcagtgtggttacttgtcaagctaacaaggtagaagagagagcctacttctagaataggctatcagcgggatctcccacgccatgctaaggaatttggaccatatctcattggaataagaaactactatgggatcacaggatgggctaaaaaaataataaggaacttctggaagaaggtacttctggaataggctgtcagtgggatctgccacaccatgcttaggaatttggactatatctcgtcagaataagaaactactatgggaccacaagatgggctaaaaaaaaataaggaactagtgaaggattttagatcaggaagtagcatgatgaggtttcccaatggtaacagaatcaaggggcactcaggaggggcatgggtctgggggcagggccaccagttggaaggcttcattagaagatcttggagaggattttaggcagttgaattaagcacccctagtgactcattggatggaaagggagaaagaaagttagaaggaagatattctaggatgactcccatacaggttcctgctctggtgaatcacagggtattttgtcaagatggagaatatggatggaggaggtttgggtggatatgatgagagtggagagataatgagtttatttgggacaatggggtgcctgaaagacaggtgaagagagatgggtaaacttggaagggagagtgtagaccacatgacactcctccaaattcctttagagggtagggtgggatggagtgtggagggaaggagaatccacaaggggaaatgaagcaaagcaaacaactagcacctaatatgggacctgttgggctgattttgctcagggctgggcatcaagcacatctggagaaaaattgcaaatgtaattgtaaggcaagcctttaaagagcagttaaaaacctgttttgaaacataggtttctataacttgttgcaacatgttgagttacagcaaatgaaatagagaaatactctcagtgctttttaatttgccctgctgactggaaacctcggaactcagccctatgagctgttaaccagataagcattgctggtttttgtaaagaattatgcttgacaaatgcttgagggcatatggatttattgaaggaagtattgtccaaaccagactgacaaagaaagttttacaaagaaaatataatgaaaaaatgttgggattaaaatgtaggtcttttctgttttatgatgtagttatgaaatgtaaattagaggatgtttcaatgaacttttgaattataagttaatatagttcataaaccataggaattaagtactattttaaaaataggaattatacttccactcaaaaacacctattttgtggaacactaaagtttgaaatatatatgtatagagattagacttagaactcacagaaggtaaattcaagaaatttttaaaaattactccaaaacattattttagttctttccatatctattttgttctaggaactgaactgggttctgaaataataaaaataactggtatctgtataatgttgtggttaatcccaactttatgcaactattctattcaatgtggtttctgggggtccagataaaatataacacttgaagcagagtggggattgagggacagagaaaaaaaaactgagaactgagaattgaagaagaaaggcaaattaggaagttcaacaaggttaggagagtagtggagccaaaaaaacaatagtcatgagaactgaatatagaaactggacaatggctagatcttatatgacaattagaactctgacccacaacctctacagcaaccagccgagaataatcaggacttggtcaatgactcagtttccctgttttttgccgcctcctttcttcaactcagaacccactaaagacagccaaatatgctacctaccccaaaccaatcacctaagagacactacttttgttagcccacctccagctttcccatgctaataccctcaagtcagagtatacatgaaaccttccctttttgttcactactaagctttcctggccaggtgcagctgctcatccctgtaatcccagcactttgggaggctgagacaggaagactgcttgagcccaggagttcaagaccagcctggacaacatagtgagactccatctctacaaagaattaaaaaaaaataagctgggcatggtggcacgtgcctgtagagccagctactcaggaggttgaggtgggaggatcgcttgctcaggaggtcgaggctgcagtgaaccacgatcgcaccactgcactccagcctggatgacaacagagtgagaccctgtaggtaattaagtaagtaagtagttttcctaatgtcctgacaggctttgagtcggccaaatgcaagtgatggtgactgactcccttgtcatagtaagctttgaataaataaagcatttgggtggtcttcctccccgatcccccccattcattcatttgcttattaattatacattagttgtgttttatctgccaggcagtggccagtattgggaatatgtggaagcaaatagtccctgccttcaaggatattctgtctagtgggacagacagacagacatatacgtataatagtaattcaacgtgctaagtgaaacaataggcatgtataaaaaaggtgtagtaggtcaagtagggcttttaggggaaggcgacccttaagatgggtggtaagggatgagtaggaggtgatttggctaagaggctgggacggttattcaaggcaggtggaggggcagaatgagcaaaacaggacgcgttgctggagcgtggtaaggaaggcaagtagcggcagaggacggcggtagggcggatcgtggggcgcaatggatgtgccacgttggaaagagcttggactttatgccgtcctcctggaaatgagataacggctggtgtaagcaagaaagaaacacacacacacccacgcgcgcgcgtcgtttcctttgtgttactgtaaggtcaaggagggcggcgacacagaaattcatgatgactggcataagcagacattcaatgaatgaatgaatggacataagcactttggtgtaaacgtcattgtcttcgatttctgttttctcacggggcaagacagtgaggtcggggcatcagtttgggaggtgatagggaaggtttaaggtgagagaactgccattctggtagggagggtcagtgggcacaaaaccaacaataggttatgggcaagggatgcgcttcggtcgcgaacaccctgaacccacctaccggagctactctgtcccaggagcggccgtggagaaagcaaccagccgagagttcgcgccccagggagggaagcgggcacagggccgcccagcgccactcacctgtgagctctccgcgggccctgcaggcggagcctcggtacgacgcctttccgattgggcgcggctcaaagtcccggggcgggcatcagaggccgagcgctctaggggattggccaccctggcggacggacgtgctgctgaccgagctggttcgcccccggttcggctcgtggagagccggcccctccgtgagtcttctgtcagtcattggctccctgcggtttccttggggacgtggcgccgccgccggccgggccctccttccggctgggcaaggggccgcggggagcagctcgggacygaaccgagaggtgccgaaggaamcggcgggccgcttgatcccgtgagtgtgggcgcgagagggctgtgggacccggwgggacggggagaggaagcgggacccacaccccgccacctggggacgaccggttcctagaggacagagctggcccacgagaacgccccgctcccaggatgcccgggtagggtcccctgggcctgaggaaccagagcagacggagcgggagcctggggaggaggtgggagccgtggaattcccgtgcaggtttgtctcgtgggctcagtcggacagaagcctgaaatcaaatctttctaggctgcagacgtaggagatgcctgggacaaggaggccaccttctcagggcaaaagaaaaagaaggtgacaggcgttgagaccaccgaagggaacccatggctaggtaaggctgcacactttccctccggctgggagcacggcagaggatggcaggcaggttggggggccctgggaggctgtcccaagtgaggtttgccctggagctgcacttggactttgtattctggttagttggatgcagagacgatcaaagttgtattatttcgagggctgataaataatagtttctagcccatagaccaggagtggtagagtgagtcggcttgctcagctctgtaaagtgcaaggttgtaacattgattcagattcgcatctgagcaaggctaggtgccacttgaggaggttaaacaaagaagtttttttgttttttgtttgcagtgaactttaaaagcagacagaccgaggtccttttgaatcaatatacaaagtgaacttcacagatgaatacacttatccatacattataataacctgaagcttttaaaaaatattaatgtggatctacatgcaccaataagggaaagttataaaataaagtgggggaaagatgcagaacagcaggtatggtggactaccatttgtgtaaaaccgagggaatggatacgcacacacacacacacacacacacacacacacagagatatattactgtaaatatattggtgtatatttatgcttgtgtatccgtagaatatccctggaaagatacacagcaacggccaggtgcagtagctcacgcctgtaatcccagcactttgggaggccaaggcaggcagatcacctgaggtcaggagttcaggaccagcctggccaagtagaaacccggtctctactaaaaatacgaaaattagccgggtgtggtggcagtcacctgtaatcccagctactggggaggctgagggagaagaatcgcttgaacccaggaggtggaggttgcagtgagctgagattgcgctactacactccagcctgggcaacagagcaagactccatctcaaaaaaaaaaaaaattacacagcaactgggtagtaatgtttgcctctgagagattgtggggtcagggcaagaatcacttttcactatacaatatatccttttaaactgatttgtcttttactatgtgcttgtataatctggtaaaacatttttaaaatcagttaaataaattttctgaccatcctgtttcttgacagaattcttggttgggaatactgtagttgctctgattctccaatgttatgaggttgcccagggagactggtgatcttttcactaacatgagattaagtctttgaattgcactcaaagtgcagtttggaaaaagggcagataaggcttttctgatatatatagtagaagcaccatgagcttcttctaaaattagagatgacaagaacatttagacttctgttggcatggatttttgcctttattaggagggttttatccaattttaaaacgatatttaagcactcagttgtagaaatgtttcagacttactaatgtttgtctaatttcaggatcagtttttcctacctctgcccagcctcctggtacttcactgtgcccacagtgagtccatttctccgtcagcggrtggcattcctgggactcttcttcatatcctgtctccttttacttatgttaatcatagactttcgacattggagtgcttcattaccacragataggcaatacgaaaggtgagtcagctttagattttggcactcaagtcataaatattttcataagctgtttaacacactactgactttgacccttttgggtgatactgtacttttattagtaaaattgcatgccatttattacataaagaagattttaagccctattttggcaatatgcagtttggtacaggaatactgatactgcatgaaaggcatctttgtgttttcttgttttggtgggctgaaacttattgtgtgtataaatgtttaggactgtattatacctttatgaatggacccctttatcattattaaatgattttctttatccttgattatatactttgctctgaaatctactagtctggtattaatatagctactccaactttcttttgattaacattagcatgacagatatttcttctatagttttagttttagcctattggtgtctttatataagtgggcttcttgtagtcagtgtttggttgggtcttgtttttttatccaatctgactatctctgcagttaattggggtgttcgggccatttatatttaatctgattatttagtatgtttagttttaatcttgctatgtgtttttcatttgtcacatttgttcttgttctttttcctctttttccctcttcttttcagttgagcacagtttttatgtttccattttatctctcatgttggcttattagatataacttcttctttttttagtggttactttaaagtttatagtgtcatctttaattatcacaatcttccttcaagtaatattactcctcttcacatctagaacaagaacctaacaacagtatactttcattcctcccttccccttggtctttctgctactgtcatgtattttatttctacatgttataagctccacaatatattgttattatttttgtgttagtcaattgtcttttgaagagattttcaatataagaaaaaaaggcttatgtatttaaccatattgttgcctgaaagggtcatataagcaaagtgacccttgaatgctgaagggacggagaaaccaaaggaggaggcaggcaaattgttcgttggtattcattgatttattgagggaatttgcagacagaagcrtggccctgggtagctgcaagacagatagatctccatactgttactccccagacccagggcttatatagtacagggagatggtatatgcaccctgtgcaagacaattaaagacagccctccagaacaggtaagaatgctgcatgtgccatatcctgtcatttgtgtgccaacaccaaggttgacatgttcttacagtagtaaataaagcaggaatcaagaggcatttacgggactgaggctagtcagaagtcaatgtggcagattaacatccaagatggagtcacttttgtctatatttaccatttctggtctgcttcattcctttgtgtagatccatatttccatctggatccatatttccatatttgcttttacctcaagaacattctctagcatttctagtagagcaagtatgcggtgataaattctttcaacttttatatgactgaaaaagtccctattttgctttccttttgaaagaaatgttcattgggtatagaactctaggttgatcattttttttcctttcattactttaaagatgatgcttcactgtcttttggcttgcattctttctgagatgtctgctgtccttttaatctttgttctctctgtatagaatgtatctttttcctctgaatacttttagaattttctgtttatcactggttttaagcaatttgattgtgatgtgctttgatgttgttttctacatgattttatttgtttttttttttttttgagactatctcgcgcatctcccaggttggagtgcaatggtgcaatcatagcccgctgcagcctcaatctcctgggctcaagctatcttcctgcctcagcctcccgagtaactgggactacaggcatatgccatcatacctggctaatttttttgatttttagtagaagtgaggtctcgcagtgttgctcaagctggtctcaaactgctgagctcaacctatcctcctgcctcggcctcccaaagtgctgggattactggcatgggtcaccgtgccctgcttacctgattcttgtgcttgtgatttgttgattcttggatctatggatttgtagttttaatcaaatttggaaacattttgtccattacttcttcagatttttgttgttgttgttctcccctgcttttcctctggggactccagtaacatgtatattgaactatgtgatgttttcccacagctcactgatgttcattttttttccagtcttttttctctctgtgtttcattcgtatatttttttgctgctttcaaatttgttagtatttttttctgtagtgtttaatctactgttctatccagtgaaagtttgacatcttttttcacagatagtacatctgaattattttatatacttttagctataccagttgcacagaaggtctatatttctttatagcagtgattcattttgctatttttttgagattagtttttgatgaagctacaaaattaaataatggcatgttatgttcattatcttcaacatgattttcttattaaaaaatttttttctttagagacagagtctcactctgtcacccaggctggagtacagtggtgcgatcatagctcactataaccttcaattcctgggttcaagcaatcctcctgccttggcatctcaaaatgctgggattacagatgtgagccactgtgcctggcctcatttttaaaatatttacattttctttttttttttttttttgagacagagtcttgctctgttgcccaggctggagtgcagtggcgctgtctcagctcactgcatcctctgcctcccgggttcaagtgattctcctgcctcagcctcctgagtagctgggactgcaggcacatgccaccatgcctggctaattttttgtatttttaatagagatggggtttcactgtgttagccaggatggtctcgatctcctgaccttgtggtctacccacgttggcctcccaaagtgctggaattacaggcgtgagccaccatgcctggcctaaattttctttttattgcttctcagatatgtattagttaagaggctttgggctgcaaataacagcccacattgacttaaacaataagaatgctcacatacctggaagtccaggggtagaaggactacaagttcaacactggctgacaggatgagaggctctgtctctcctgtctgttgtccacagtgtcagtttacttaatggttgaaaaacagcagactgccgggcatggtggctcacgcctgtaatctcagcactttgggaggcggaggcaggtggattgcacgagctcaagagttcgagaccaacctgtgcaacatggtgaaactctgtctctacaaaaaaatataaaaattagccaggcatggtagcatgcacctgtagtccttgcttcccaggaggctgaagtgggaggatcactggagcctggggaggtagagaatgcagtgagctgggatcacgccattgtactccagcctgggggacagagtgagaccctgtctcaaagaaaaaaaaaaaaagagaagaaaaacagcagacagtagcaaccagggcagcatatatattcacttatgtcccgtaggagacagaaaggctttccatgactctcttctaagaatggagaagagccttgccagaaacctctaacaaccatttcctggaatcttttttggtcagaattgggacacatgcctaccctcctttttatttctggattctgtccccagattttctcatttcccattcactttggtcattcattcattcattcatcattcattcattcattcaacaaaaatttgagcagccactatgtgcagacgataataggcatcagacaccagatacagagactttggtacattttctcaagaagcttatgttttcagccttgccttcttctagcagcccaattcatttgtatttttggcttgcttttcttttttttttttctttttaaacgttactgaaatagagatggaggtctcactatgttgcccaggctggtcttgaacacctgggctcaagcgatcctcctgctttggcctcccagagtgttgggattgcaggcatgagtaccatgccagcctcgactttcttttcctttccagaagaggaaacactgtttggatgattatagtaatcaacaactgcccttaagaaatgtactaaatttggagacctaaatccataatttgagtttgtttaatgcttatggaattttcttgacagacctgcgcatagtttctcacttgaagacgacatggtctaattatggacttccatgtaggttagttaatatggctaaagacaattagggagtgaatggtgagctgtatggctggagagctagatcaagctgagtctgttaagctattttagagggtttaggcattaccctcagggcagaaggaaggctttgaaaggttttgaagagtgaaaaggttggaactgctttttaattttttttttttttgaaacagagtctcactctgtcacccaggccggagtgcagtggcgctatctcggctcactacaacctccgcctcccaggttcaagcaattctcctgcctcagcctcccaagtagctgggattacaggcatgtggcaccatgcccagctagtttttgtattttttagtagagacggggtttcaccatgttggccaggctggtctcgaatccctggcctcaagtagtccacctgcctcggcctctcaaagtgctggggttacaggcatgagccatcgtgcccagccagaactgcttcttaaagaaagctcactttggtgggattgtggaaaaagaattggagaggaatgaaaaagaaagcaggaagagtaattgaactagagatgctccttgacttatgatgggttatgtaaattgaaatatcataagttgaaaatgcatttaatacacctaacctaacaaatgtcatagcttagcctagcctactttaaaggtgctcagaacatttacattagcctactgttgtgcaaaaccacctaacagaaggcrtattttataataaagtattgaatatctcatgtaatttattgaatactgtactgaaagtgaaaaacagaatggttgtgtggatactcacggtatactttctactgaatgtgcatcacttttgcaccatcataaagctgaaaaatcataagttgtaccattgtaagtcaatgactgtacctcaatagagagatggttgtggttgcaagaggatggagagaggtaaaagcatttaaatgtatgtgggtggcagagtgatctgataattcttgtctatcactgtatcccaagtggtcagagccaataaatacttggtaggttgaattaattgaaacaagttagcaatagagctgaggaacacatagactgtgccactgtggcgacctcaccaaagtcctaacaccctggaatgctgtggctcagagctcattgttacttaatgaaaggttctgtatatattgccacaaatgaccatttatcattaaacttcactcagggcagcctccatgagtcatttaagaggcaaacatttattgagggtttgctgtgtcgatgactctatgatagcactggagtacaaagatgactaaacatagcccctgaactcaaggagttcgtaatctagttagagaggcaggcataaaggaaaaattatttcccagtgagataatagtttaggtacggttgtatagaatcaggagtgaagaatcaggaactatgtacaaggttaagaattaggaacaaagctaagaatcagaaattaaacagaagaagttcttgagcaaccaaatttgatatcactaagttcatgtgctaaaagcacctgtactttactgataagataggctctcacataaagcctgttagcttttattttacacactgttctcatttgcatggttctcacttgtctcagaacacagtagataacagcaaattggaatggtgggtggggtgtgttgttagatgtgggcacattatgacaataatcagttatatctggcatcttgacagtgaagcaggagagaggaaatttaataaagatagactcaataactcaaaatttctacagacagtttctatagtggtaaacagttctacatatgttgttaaaactgttttattacatagtctaaaaatttatgttaatgaaatgataatctttttttttttttttttttttttgagacagagtctcactctgttgcccaggctggagtgcagtggcatgatctcagctcacttcaacctccacctcccaggttcaagcgattctcatgccttagcctcccgagtagctgggattacaggtgcrcaccaccatgcccggctaatttttgtatttttagtagagacagggtttcaccatgtttgccaagctggtctcaaactcctggcctcatgtgatccacccacctcagcctctcaaagtgctgggattacaggcgtgagccaccaygcctggccattaatgataattttaaatcagaggttttcaacctttgtgtatctaaatcacttggggacctttagaaaaatgcaaataattgggactcttctcaaggtgaatctaatataccacctgggttgagaaaaactgctttaagatttggttacatttacttaaggaggtattgtgaggtaagggaaagaatgttaatattagagttaatcagcccatcatttgctagttgggtaatcttgggcaggtttcttaatatcctggaatttcatattctttatatataaagtgagaataaaaatagctgtcttttagtcttgtcatttgcataagaagagtagagcatctaggaatgtcaggtgcattgattgactaatcaaatgtcaatctattatttgaaataatcttgatttttctgttttccaattctcttctctgcctgaaaatatacactgaagataatgggcgttataatctctatttaaaattttgatgaaatgattaagcaagtaactaggaattggtagaaacacttgctaccttaatttaacagcttaaaaaagttttaacacaagcgcctgtagttgtgatttttttatattatattcatatatagacatattttttctacttaaattgttcctaattcacacagtgaaattatatccgtactttgtggtgtccctcagaaagtgtgctgtcttccaggaacccacttacacgtgtcttcatgggagcaagtttgcaaacctttgatcaggaaaatgtgcctagaggaacactacatgcattctttattttattttatatatcttttttttttttttttgtagagacagtgtctccctatgttgccaagcgtagtcatgaactcctaggctcaagcaatccacctgccttggcctcgcaaagtgctgggattacagatgtgagccactgtcctaggcccattcattgttttatggtcttgacaaataaggcattgctttaattagaaatgatagtctctcttgcacattgcatctttgtattttaatatatatgaaagcagttaatgtttaaaatattttaattacttttgcattgaaaacagatatttcaatgtgaactttttataggcattggtggaatttaacatatcacttttcaggggatattaaccaggactttagaagcctgtcagggggttttctctcagtagttccagaactaaagacttacattttttttctttattgtgaacatgtatccatattgcttctggaaagagagagtaggaagtttgcatcaaaactagaatttatttgatacaaaaaaagtaaatttagagagatggggtgtcagtaaggatagaatccaaaactgtgttttttttaatacactttttttagagccattttagttttacagctcatttgagctgaaggtgcagagatttaccacatatcccctgaccctacacatgcacagcagagctgtttttgagaataatacttgtgttagatgtgtggtttttttttttttttttttttttttttgagacagagtcttgctctgtcgtccaggctggagtgcagtggtgcgatctcggctcactgcaagctccrcctcccgggttcacgccattctcctgcctcagcctcccaagtagctgggactacaggcacccgccaccaggcccagctaattttttgtatttttagtagagacggggtttcaccgtgttagccaggatggtcttgatctcctgacctcatgatccacccgcctcggcctcccaaagtgctgggattacaggcgtgagtcactgcgcccggccgagatgtgtgttttaatcaactatttttctggcatgtgccacataagacatgctccaatattttcttcagactcaatacatatcttatatccatttattcatttatctgtttacttattcaacaattatcgagtgtctacactgtggtatcaaatagggtagtcactacccacaagtggctaattaaatttaaattaattaagattaaatgaaacaaaattcagttcctcacytggactgggcacatttcaaatgctcagtggccacatgtggatatatgggacagtgcagatagagaacattttcatcatttcacagagttctgttgacagtgctaagtgtaccatgttttaatttctgctgtggatgctgggtaattgttaaaatttattaatttttcatacagtcgtgtgttatataatgattgggatatgttctaataaatgcatcattaagtgatttcatcattgtgtaaacatcatagaatacttacacaaacctagatggtacagcctactacacactgaggctgtgtggtgtatacgctcctagcctacaagcctgtacacatgttgctgcactgaatactataggcaactgcaacacaatggtaagtatttgtgtatctaaacatatataaaaatagaaaaggtccagtgaaaatatggtatcaaagataaattgggtctggtatggtggctcatgcctgcagtcccagtactttgggaggctgaagtgggcagatctcttgagcccaggagttccagaccagcctaggtaataacatggtgaaacctcatctctacagaaaatttagaaattagctgggtgtggtggtccatgcctgtagccccagctacttgggtggcggaggcgggaggatcacttgagcccaggaggccaaggcttcagtgagtcgtaattgctccgctgcactccatcctgggcaacagagcaagaccctgtctcaaaaataataataataataataataaaataaattgtacacctgtatagggcacttaccatcaatggagctcacagaactggaagtttctcagagtgagtgagtggtgagtgtgaaggcctcggacattactgtagaatttataaacactgtacatttaggctacactaaatttatttaaaaattatttaaaaatttttttctttcttcaataataaattaaccttaacttactgtaacttttccactttctaagctttgaaatttttaaaaactttttgactgttttggactaacacaacttaaaacacaaacatattgtaaagctatagggaaatattttccttatagtattcttattctataagttttcttctatttttaaaaacttaaagttttttttccttttaaaacttatttgttagaaatgaaaacagaaacacacacattagcctaagcctgcacaggatcaggatcatcaagacatcattaagtaataggaattttttcagttccattataatcttatgggaccactgttgtacatgtggtttgctgttgactgaaacgtcattatgcagtgcgtgactgtgtaagaggaacttctagcatgtatacatagtgtacaagacactgtggtaaactgttcttaaatgttctgtttaatacctttcctttttcacattcatgtttaatattgttcactttttggtagcctcactgttatcttcattagtgggtaaaattttgtctggttgaactattgtctgaagaatgtcttttgtagctattgaaaggtggtgccttcatgttcctttaccatctggaaataactgaatgagaggttctgtgtcarcaattggcttggtactggccttccataggtgtttcaattctgtttaattaaagcaagtcaaagagaarcattgcttttggttagaatgctctttagcatatacagatgaaatgattaggttcttatgtgcaatagaacagttcagagatttttgatggtgaaattgaaagcatttattcacgtttattttattatttatagagtgactcaagccatcctcctgcctcagccttcctaatagctgagattataggtgcatgccaccgtgcctggctaaatttctttttttatttttagagacaggggtctcactatgttgcccaggttggccttgaacacctgacctcaagcagtccttccaccttggcctcccaaagtgctgggattacaggcatgagccactgtgtctgtcccacatttattcagttacttgatcttttttttttttttttggaaacagggtctcactttgtcactcaagctggagtgcagtggcgtgatcatagctcactgcagcctcaacctcccaggcttaagcaatcctctcacctcagtcccccaagcagctgagaccaaaggcaagcaccaccacacccgactaatttttatattctttgtagagatggggtttcgccatgttgctcaggctggtcttgaactcctgagctcaagcaagccacctaccttggcctcccaaagtgctggcttatagccatgagccaccacacccagcccatttatttgatcttaatggtgttttgagcaggactttaaattatagatgttcctgactgctctgattaatcttgttaggaggcaagcagtaatcttacaatatacttttctgggtatgtattactatcatcagtcatgcacagctactttaactgtaatatcattatatttggttctgagctttgaagagagttgaagagtatgatgacattcagcaaagaattagtagccccatactcatgggggctacttcaattgacttttggcccatcactgagctctgtttgaactctaaagtggtataattagttttgattttgtaagctaggtaatggtttgcttagttacagctctaacgctgttaatgctttcaggataatggcagtgaaaagccattgtcttccaattccaccctgggtgatatatttgtgggtaactttcttttcattgactcagcagtgactagaaggaaatcatgtttcttaaacagaggaggtgtgtgtgtgggtatggtattggggtgagtatgtgtgacagtgaatcagacctctttagggaaggtggatgtgagggatgccaaggcttttgagacttttctcttgggcttttggtcctctttagagattggctagtgtggcatcggcaaaacaggagggtccagcaatgcaaataattggccatgatggctaaggccatggctacaaattatatatgacaaaaaaaaaagaaactatatatgaaaaaatgcatgaaaggtctggtgatccattcattttaggagcctaaatagaggaaggcttctagttggttgaaagtgtaagaaacctgattaggtcataagaggtcagagttccaggaaaaggtaatatggctactgcccagaggggaaaactgttctttagttactagtttgtatgcacaatgagaaaaatggagactttccactgcataaatgccatttaggcctatcttcctctttagtgatcaaaggtcagctgacattttagccaaagcacacatggagacttcraaaggaagagaaagaaaagttgagttgcaccaaaactggagctgtaaagttccttattttggcaggaatcagagaggataacaagatactttatttggaaagcaattaaaactttctaagaaagagaccagttgattttgaatagagctgtacaaagacacggaggagttaacagaccaacagctccattttgtgagctctaggaccaaaccaatcaatactatttgatacatcttttgggcagagaaacatgagaaactctgtgacaatatcaaggtastatagataaggtacatgttcttgagaaacttatggtctaaacaggtagagcaagcaaatatgaaagaaatcttaggggctcatactgaaatataaacagggaatattgacgtccacattttagaacagaaggaagaggccttttcaaatcattctgggtactaccagtcagcattgttgggtagaggctttttaagaactgagaagccatgtccaaggagacaggagaggggaaggagtaggtagagaagcagatggatgttaaagagaaaaggaaggctgtattagaacagtggttctcaagagtgtttagtggcctttggagggtctctgagacacttttgggagtctgtgagggtgaaactattttttataatagtactaaaatgttattttgccttttaaaactatggttcaaacatatacaatttaccatttttaagtgtacagtcagtagtattaagtatatttacattgttgtgacacagatctccagaattttttcatcttgcagatcataactctgtatccattaatgaactctccttttctctctctttccagcgagctgctggtaactaccattaaattttctgtttctactttagatacctcatataggtggaatcatacagtatttgtctttttgtgcctggcttacttacttagcgtaatatcctgaagattcatctgtgttgtaacatgtgacaggatttcctcctttttaaggcggaataatatatcattgtatgtatatacaacattttgtagatccatttatctgttgatggacatttgggtcgcttccatctcttgactgttgtcatgttttttacctttttcactgagttgattgatacttgctttgatggtgcaaaagcaatggcaggtaaaaccgctaataatgccttagtgcaaatcaagatagaggcaccacattgtactagtagttactatattcttcattgccacacaattgcattggaagaaaagattcagttccacttatgaatatcttttcaatattctatgtgatgaaaggggaaataggtattaagcacttctgctatatgctgaagttgtctagagtaaaagcacttgggcagttttttgaattatgaggtaaacccagctgcttttatcatggaacactatttttagttaaaagaatgactgccagaaaaactaaggtttcagacttgtgtattttatagacatttccttgaaaatgagtgaaataaacctgtcacttcatgaaaaacagttttcagtatttattgccaatgttaaaatttgaacttccaagtgaaaattagtattttggaaaactgtatctgccactgtgaaattggatagcttcccaatacttaaaagactttttgagtaagattggtagtgatattaatgaatgtgtgtttttttttttaaggattgtagaatgaaatgtatcartgttaggaagatttgcataactcagtgaaccaattattttccaatagatgatgttatgaaatcatgcttggataacagccattcaaagtgcaygttaaacccatgttttttaatggattttaatgtaacagagtatgaaaagtttttagatagggttttagattccaattgcaactcatctttttttrggggggtggggtggggtggggtttagattccaattgcaactaatttttttttttttttttgagatggagtctcgctctgttaaccaggctggagtgcagtggtgcgatctcggctcactgcaacctctgcctcccaggttcaagtgattctcctgcctcagcctcccgagtagctgggactacaggcgcccgccaccacgcctggctcattttttgtatttttagtagagacggggtttcaccatgttagccaggatggtctttacctcctgacctcatgatccacccacctcggcctcccaaagtgctgcgattacaggcatgagccactgcgcccaatcgtgactaatctttaagaaacgctacttgttgagttttagtatagtatcaaagaagagtattcagaatgatctgaaagggctgtttaatactcctcctgtttccaacagtgtgtctgtgtgaggctagattttcacacaaatgcttcaatttgtgtgaaaattgaaaattgaaatttttcagtattgttttgatatattgtaacagattgaatacggaagtaaatgcgagaatctagggtcttctgttagtttggctactaaagatatttgcaaaattataaaacaatgccactcttctatttttttgttttaggagatatgcttatttttataaaaatatatttatatgtaatgagtttattttatttaaatgaaatacttaacatttttatgttttattttctaatatagtaaatatagatagatacaacctatgtctatgaaagctctttggggttcaataagttttaagattataaaggagtcctaaggcccccaaatttgagaaccagygcactagagaaaagttattcattatgcagaaggggatgggatccagaatcttgcaagagacaagcagagtgggtggttttcagagaagggaagcaggaagattctgtgaagcatgtgaaatagaaagattgctatgattggaaatgaaaagtcactttggaatgggggtggattatcttgcctatttcttttttatctttggccttttgtgaggtcagtatttgcaagagttctgtgacttgaacccagacttttgcccagctctcatatgatagaagtgagctgttgctagttgattggtggattctagcccagttcagcccagtgatttgatttatgggaagatatgtggtgaaatggaatctttagcattagaaactttctgttatgtaacagatttttaccatctgcttcatttccctcaactcactaccatttcagatccagaaaaaaagttctacctacccctactctcagtaataatttacattatattgaagctcagttccctgttctcttttttaaaaaaatgcattttgcattgtaatataggaaaggtactctacttttttatttcagaattatttctacatgcacttctttttatcaagtttgcttttctgcccaaataaggaatagtgtggttttgtctaacgatgtgaaatcaccaataaacactggctagattggtttcaggagcgtgatgcgtggtttgttgttctgattgggggtggttttaytgtgaagctaatgatccctataccttaaagcccctcacttacatgggctttttttctatttgtaatgctgaatcttgtttttaaaagaaggctttccaaattctgttagcttcagacatcacaaaagctggttctgaggggttctgtgtaagagccttggagatctaggagttggctttaaagacaatgttggatgagcagggcagatagctttttttttttttttttttttttgagatggagtctcgctctgtcacccaggctagagtgcrgtggcacgatctcagctcaccgaaacctccgcctcccaggttcaagcgattctcctgcctcagcctcctgagtagctgggattacaggctcccaccaccatgcctggctaatttttgtatttttagtagaaatggggtttcaccatgttggccaggctggtctcgaattcctgatctcaggtgatctgcccacctcagcctcccaaagtgctggcataacaggcgtgagccactgcgcccagccaagtgctcagaagtattttaatcaactcttagtcttctttattttctgaacttttaagcctttttcctcagagtcttctactatttactttcccaatgattattctgttaacagcggcagcacagttctgctatgtgtatgatctctgtgagtgtagatacccttcactctccttgttttacagatgaggaaacagtctgagagaagtttattaacttgcctaaggtcacacagcatagaaagcaatagagctgagattcaaaccttgctatgtttcatggaacacctttacttgtttcatcttcctgatgtcagccagccagatatcttggaatgagaatctgaaaaaattccaacacaaaatactaatgtcctaggggccaagaattattattattattttttaaaaatataatttattttttaaacttggtggtaggtacacaggcatttgttttattgttattctttataccctatacatattttattatcattctttttatgtttataaaatatttaggccaggcgcggtggctcacgtctgtaatcccagcactttgggaggctgaggcaggcggatcacgaggtcaggagatcgagaccatcctggctaacacggtgaaaccccgtctctactaaaaatacaaaaaattagccaggcgtggtggcgggtgcctgtagtcccagctacttgggaggctgaggcaggagaatggcatgaacctgggaggcgaagcgtgcagtgagctgagatcrtgccactgcactctagcctaggagacagagcgagactccatctcaaaaaaagaaaaaagaaaaaaaaagatatatgtatatatataaaatattgtagaaaagaataattattgtttttatgaattacatttttaatgcaattctagcaatataaatacaaaacaaaaagcaaaaccaaaaagcccaatcaaaaatatcaccacccaggcgaggtgcagtggctcatgcctgtaatcccagcactttgggaggctgaggcaggagaattggttgaatttgggaggcagaggttgcagtgagctgagatcgtgccactgcgctccagtctgggtgacagaataagactccgtctcaaaaaaaaaaaaaaatcacctcccagaaactcattaaatgagaaatcattccacaatattctggatgcatctatacagaaagatagaaaagaagtgattaagattgtctcagttatctagtgtgcgttaacaagctaccccaaaacttaatagcatataacaaaaaaccaattatttattcagggctacaagctctaatgcttgaaaaaagattgctaccttagccagtttcagagctgcccccacacgtggggacatcttttagtcatctaatttcagtggcttctaggcaagtgaaccagctattgtctcaagcacatcagtaaatctgtcaatattgcttcactcattggttaggactggtagtcccatgtgcttagcacatgtaggcacttaatgaagattcatgaacaaatgaagtaagtgagggcgcctttcatggacctgactgcttagcactgatttctctttttgcctgacttaggtatttggctcgagtaggggagcttgaagctactgacactgaagacccaaatctgaattatggacttgttgttgactgtggcagcagtggttcccggatttttgtttatttctggccaagacataatgggaacccccatgacttgctggacatcaaacagatgagagaccgcaacagccaaccagtggttaaaaaaatcaagccaggtactaatcagaatatattttgttgtcartctcttttaaggcatgaaagaggagacaaaagaagcagaaagcaagctacccctttcttcttgagagtctgggtaatgggagggatatctctttcattgtcaccccctacctctcaaataaataaatgtttaggaccttgaggagaactttatagggtatcagtttcctgagtcttatgtgagccgctttttaaagaaagttttgtctgtttgtttgttttaacttaaggaatctctgcaatggcagacactccagaacatgccagkgattaccttcgtcctctgctgagctttgctgctgctcatgtgcctgtgaagaagcacaaggagacccctctttacatcctctgcacagcaggcatgaggcttctccctgagaggtgagatgcagggtacaggaaacacaggaaaacggtggcacaagagatgaaaggccagtttcatgcactgtcctctgtggttccctggtctatacccctaaacccaattatgacacaatcattcattcccaacttcttgtcatttgctgctttgggatcagtatctatctgggatgactatagtgattcttagtttggattgagggttgggagtagtggtgatggtaatagatttggatcatcgggcacatagagaacataattacagaataaattaggaagagggtcacctgatgacctggatacttagggactagtcagagagctctggtaggaacactaccttttctgtaactctgcctagaaccctggcaataactgggggagtccctcttcttgctgctactgcaaagctcagtctccattgccttaggcctgttttytcagccccagccagtcacatcatttccacttgacctttgcaattcagcctgacaccttgccacctgatccctcttcctgcattagaggaagaggaagagaaggctgtatttaggccagactccttgtttgtgatttctytcctttggkaccaccttgatccgtccatacttacgtaggccgggggaagaatgagctccctgactttttttttaatgatttttattttattgtggtaagcatacaacatgagagctaccctctaaccagatttttttctttttttttagagacagggtctgctctgttgcccaggctggagggcagtggtgtgatcacagctcacttcaacctctgccccccaggcccaagtgatcctcccacctcagcctcctaagtagctgggactacaggtgggcaccatcacacccagctaatttttgtggagccaggtttcaccatgttgcccaggctggtttagaactcctgggctcaagtgatccgcttgcctcagcctcccagagcgctgggatttcaagcgtcagctaccatgtctggcccaacaaatttttaagtatacaatacgttattgttgactgtgtgtacagtgttgtacagtggatcttcagtgcttattcatcttgcttaactgaaattttgtgcctatttatttcccttagcatattgtcgttagtgttcatccaccttgtcacatattgcagaatgcccttttttatttaaaaaagtctaaatagtattccactgtgtgtatgtaccatgttttctttacatattcatctgtcagtgaacatttaggttgtttccacatcttggttattgtaaataatgcttcagtgaacatgggagggctcatatctctttgagatcctgattttaaatctttggaataattagccagaagtaggattgctggatcatatgacagtttgattatttatttatttatttatttatttactgagacagggtctcgctctgttgcccaagctggagtgcaatggcatgatctcggctcactgcaacttccacctcacaggctcaggtgattctcccacctcagcctcccaagtatctgggaccacaggcatgtgccaccatgcctggctaattttttgtatttttttttgtagagatggggtcttgccatgttgctcaggctgttcttgaagtcctgggctcaagcagtctgcacgtcttggcctcccaaagtgctgaattacaggcgtgagccaccgtacccggcctatatttttaattttttgaggaacctccatactgttttgcagagctgctgcaccattttatattcccaccagcagtatgcagagtttccaatttctccacagccctgccaacacttgttgtcttttgttttttggataacagccatcctgacaagtgtgaggtgatatgtcatcggggttttgatttgcatttccctgatgactagggatgttgagcaacttttcatatgcctgttggccatttctgtgaatggagaaatgtctattcaagtctttagcccatttttacattgggttaataggatttttgctgttgagttgtaggagtttctaaaatattttaaagataaaccccttaccaaggtatagttcgcaaatattttttcccattctgtagcttgcctttttactctgttaattttttcctttactgtacagaaatttttagtttgatatagtcttacttgtttatttttggttgcctgtgccttttggtgtcatatcaatgagaccattgccaaccttaactttagaattcatcctcctggaatgttcatggtctcataggcatcaggtatttccttattagcttaaatattttcctttggtcaacagcagttttttttttttttttacaacgtttaaattttatagttggctttctttccttaaatcaacagcaaacaacaaaaacctcagccatacatgtagggctccaaggcttatgtcagacatgtagacaacataacatatagcagcaatgcttctttcagtggactttttttcacagttactggtttactgactggtttactgttgagaagcagattatttatatagccatttgtcaacatgagaggttttttagttccttattgccccatacatttcagtctttaaaaaattttttgttttgtttttacttatctttaaaaccaaactttaaatattgtaactgcagccttaactccttaagggaaatcttaaaaatgaacaaaacaatacaatacaacttacaaccctgctaccctatcaaaactgtttcgttttgttgtattccctcctttctgttcacatatatgtaatttccacaaagttgcaatcatactgtgcatgcaattaagaatttttatttgacataggtgatattcatattgttcaaaaattttagaaaccctgggaagaatatagatgacacaagagcaggtgccacatcacaaagtctataaaaggccaaggaaaggggagggaggccagagaaaaagctgacctggaggttaaaaaggcagaattgaccagctgagctgggcagaggaacccacttggtagtttggctacctttagtgtgtttggaggaaaggagattgttgcctcacctcctggcactgttcggtattacctctgtcaaagaagtttccatccaaacaaaacccactgtgtagctccaccctttttgtctaagatgttagttgtcaatgtggaaactctgaatattaatatttattgtatctaaagaatttttaaagaaatttgccttttttttttctctttcaacttgttttctggtcacctctctaaataatgcatacatctgttctaggcttataaaatcattgctgcctctaagtccaagcgagttgttggcataaatgtgactatcagtataagaacctgttttgtatgattaaaggtttgctaatttattagcatttgtaagcagattcaaaatagggttgaaccatttagactatattttgaatttattagcatttggttttatttctttgccaaaggcctggactaacagaattttttctacctcccttttattttgcagttaaaaaaaatcccttaaaaattacaccataatacaaggtggtgtttaataaaataataatttttattttaggaaatttcacttgtgtataaaagtaaagagaacagtgcagtaaatccccatttacccactacccagctttaacaattatcaacatttcgccattttaaaagcattttaaataaataaacaatattgaattttagaagatgaaagctttatcctgtcactatgtatacatgaagaatgatttgggtttttgtttttttagcataaatggaatcacattatacatactgttttgtaaaatgtattggacatctcttatcttttcatgtctatacatgtagatataagtagacttcatttcttttaacatctgtatagtattacattgcatggctgtgccataagttatttaaccaatccctatggtatggtatttccagtttttcattgttataaataattttcattgttataaataatgctgcagtatttctcttctttattttattgtttgatgatttccttggaattaatttctaaaagtataacagctggatcaaaggttaaacacattgaaacattttgaagcatggtcctggattgccctttagaaaggttgtactagtaatttatttatttatttattggagatggagtctccctctatcgcccaggctggagtgcagtggcatgatctcggctcactgcaacctccacctcccgggttcaagcgattctcctgcctcagcctcccgagtgggattacaggtgtctgtcaccatgcctggctaatttttgtatttttggtagagatggggtttcaccatattggccagactggtctcaaactcctgacctcaggttatccatgtgcctcaccctcccaaagtgctgggattataggcatgagccactgcacccagcctgtactagtaatttgcataactaacagcaacatatgttgttgcccattcttccatatcattgccaaaaccaacgaaccctctctttgaggagtttagaagcatatccaatagggacagaagaataccccttcttggtccccatttgaaattcttattgcaagaatttaatatgtataacaatgaactttttttaagaaactatacttgacattatactggaagattattacttcaaatatagatcttcactttgaastgctaacaacattcttcatcaagtagtactgacaactgtctgagccagcagaatatttttgtattgaatattttttaatccaagataacttgtcttattttaactaacattttctctagatgcatattattacttctagctttgtttctttgctttcctttgcttgataatattgattacatgcttaaaatgttagaggaaagacaaccctatagatacaaagtttcaagtgttttccccaaattggaaatgttgttatgtcctctggattttgatcctgatctagggttttcaaatggtaagattttcacaatgaaaaaaaaatcaacccttgaaatatggaaaaggagattaaaaagttaattgtggctgggcaaggtgactcacacctgtaatcccagcactttgggaggccgaggcaggtgaatcacctgaggtcaggagttcgagaccagcctgactaacatggtgcaaccccgtctctactaaaaatacaaaattagccgggtgtggtgatccatgcctgtaatcccagctacttgggaggctgaggcaggagaatcacttgaacctgggaggcagaggttgcagtgagccgagatcatgccattgcactccagcctgggcaacaagagtgaaactccgtctcaaaaaaaagttaattgttagcttatgtaaaggattacattaaaacttgtggaaccaacagtacatcttgtgtggtaatgtgaagcattgtttctatgttgtgtaagatttgaggatgagattgtgttccttaatttaacatctttgttttacagtagtgaggaataatgtaattacatcaattttatagtttatgcaacttggctgcagtttcctgtggcttgtttgtactcagcctgtgagagtcatagaaccgtagtctcatagcctcatcttttaacactctttgaataataacatcatataaggggaaagtattactattaccatgttgccttttaggtaggaggctatacctggaggcagtttaaacttttaaaatcaaaggcggtaccaaaaagaagcagggctggacaagtagatgaggtaggtgaacagtgaggtcatgacaaggctaagtagaaggacaagttgaggcagtttatgagaagagagtttagtgactaactttgggattttttgttctttcttgcaggaagcagttggctatcttggctgacctagtgaaagatttaccmctggagtttgacttcctcttttcacagtctcaagcagaagtgatctctgggaagcaggaaggtactgggccttaaggggtgcagctggttaacctctaagccaaccatggcacagcctctctaacgggtgtttagaattattctatatatcggattttaatttttctgccaataattttcttgattctgctacatagttgatttgattatttgcatattttgcattggcatctgtttagaatgctggttctggaagtcaaaaatgtatatctctttttaacttagtactaagcaatatgtttataagaatgtattagtatttaatgatttcagttggatatttggttagctaactgtacttttgaaaacatatatagttctaggagttgtattgagtttgtcaaagtcaaatgtaaggtaaattattaaagtaaggagaaactttaattccaagggatgatcagaatgagttacttttgttttgttatgccttcattgcaattactatgcagtattgataattccctggaatctcacactattgggtttgtacttttagagtgaatatgtgttctcatgcagccaaattggccagtttgatgaattatatttccatttcttataaacgagaaggagatttatatgtcttctaattgcagacatatacatgggaaaagatttaccttttaaaatttcagtattgcatttttcagttgtaaaatttctattttgatcttcttaatattctatttcttttcttttctgtttctttgctgagaccttctatctttccattcattgtaggactgcccatatttcttggttatatggttgctctaatatctttgataattccaatatatgtgtcatctcagagttggcatcttttgattgtcttttctcttgtgagttgagattttcctggttctttgtatgccaagtatttttatattccatcctggacattttgaatattacattatgagactctgggtcctgtttaaatcaaagagaactttttttttttgttttaggaggcagttgatctcaagttctgagctgctttctgtaggctgtgaatctttttttttttttttttttgagacagagttgcactcttgttaccaacactgagtgcaatggtgtgatctctgcttactgcaatctccacctcctgggttcaagcgattctcctgcctcagcctcccaagtagcttggattacaggcatgcactaccatgcctggctaattttgtatttttagtagagacagggtttcaccatgttggtcaggctggtctcaaactcctgacctcgtgatccgcctgcctcagcctcccaaagtgctaggataacaggcgcragccactgcggccggcccgtgattctattagttcatttttcttttctttctttctttctttctttttttttttttttttttttttttgagacagagtctcgctctgtcatccagactggagtgcagtgtcgtggtctcggcccactgcaacctccgctccctggttcaagcgactctcctgcctcagcctcccgagtagctgggactataggcgtgtgccaccacgcctggctaattttttgtatttttagtagagacggagtttcactgtgttaaccaggatggtcttgatctcctgacctcgtgatccacccacctcagcctcccaaagtgctggaattacaggtgtgagccaccgtgcccagcctattcattcatttttcaaagccttggccactgctatttggatttgtcctgtgtatcagccagtggctaatctggaacctgggcagtggcctagcctgtagttcagctctcagagctgtttggatattgtttagggtcagatccatgtatttgtagcttggaggtgagcccaggggttcatacacaactttgctccctactgtctgtgatccctctgccactttctggttccttggagctccctttcatgatcctcctgtcagaataccagggctttaatttgcccactctctgccatgcacttctcatgactgcatctgcatccagggccaagcggtaggaggacagagggagcctaaataaacaataggatttgtttcacagtcttgaagctacagcttctctggtcagagaaaagaattcaaagccctcagagttttaggtacctgctcaaattctacctctgttgcctaaggttagagagaacaaaataagaaagaaaaaaaaagcaggagatttcccttattttctctgaacttttggcattcctttttctgttctttggaccagaaaatgagttgaagttcctctgttcacacctggtgtttactttcatgtttcaagctgctcttaagtctagaccaggtaatatctgagggggaaaaaatgggacactcactactggcttggtggtagtttaaaccctggtctctttcccggtgtgctcattatcatttactttcagagtttccagaaagctgctccatgcattctatctagagtttatatttgtattcagtggggagacaagattgcccagaactagaactccaaaatttacattttttcttttttttcgatatcttcgtgacattcagatgatttatacttcttagacatttgttatacaattaatttctattcattgaggaaatttagaagatgcaaataattttaaaagggaaaaaaatcacaagatgaaagatttgaaattcctacattgagagtatggaataaaatactatgattactttttccaagaaaaagaggaaagagaagccctaagggagaggtgtatacatggcatagcagtagagaattaagtgagggcttttctgtttcttacttaggggtttatgcatggattggaatcaactttgttttgggaagattcgaccacgaggatggtgagtaatattgtctttttatgacagtttacctaagggctgaagatttaagttataacctatcagtagcatgtaaatgcaaattttgagttgtttttcttttttcaaacataagatgcttcattttccagtcctaatttgctttctttgatttctttttaactttttaatatggaaagtttcaaacattcacaaaagtagaataataaaatgaacctccatggacccattacccaggctcaatatttactaatgttttgccatttctcccccatatccccccatgtattaaaggtttttttttctcattgaatgttttaaaaagcaaaccccagacatgtaatttttattttcatgtatgtcagtatgtatctacaacagataaggggtttcaaaatgaacaaaaaatatatccataatgccatttttaaatttaatagaattaacaatttctaatatcatacaatacgtatctaataccctatccaggtatagattttcctgattttctcaagaatgtttattcgtagtgggcttgttcaaatcagaatctgaacaagggtcatgcattgcatttgattaatatgtctctwtagtctcttttaatctataattgttaaccttaccacctcactcccctgcctttaaaagcaagaaaaaattggatcacctggtagaaagaatttgccacatgctagatttgattgactgcatctttgtggggttaacatgttttctttaacatgtttcttatcccctcatatgtcctttaaactggaggtcagatatagatgtttgattagactcagattcaattccatctgcaagactaaatcatagaaggcgctgtgtgttttccactactcacatcaggagttttgtaatgtctggttgactcactttttgtcatgctcagactgatcaggtattgagagttcaagtattatcagcctgatctaacttagtattaaaattccttatctgcctttcatggaattgtggtaatagccaattgtgatcattgcttggacatgtttttcattagagattgcaaaatggtgatatttctaattctgtcattccttctgcatttaacagctagaatttttatgtaatgaacttttcttgatcaactctttggttaccctgacatatagttcttatgggaaagacagaataaatccttgattctttttatttatcacatttctgaataatgagttggtgtctagcaacttccaaaggtaaccagtgaaaaaaaagttttaattattattatgaactcatggattttaatatattagatgcattagagcccatcacattattagtattttaaggagcatctttaggttggctgctgtatccttttaatatgaccccaatactcttttatattccccttgctatctggtacagcaatgtattccagggtcatcttgtatactttctaccctagacctggcattggcctgtttttaaaagagccctggtttcttttagtaaaagatggtatttagagattattggtccagataccacaggtggtcattactcctgggatatcattgcttctaggcctttcagtgaacacagctaggaaatatgtattttttagaaagagaaaaataaatgagttcatagtcatatttctgactcatatgtaagattatagggtgctattaatttatttgatttttatacctatatcctttttgttctgttatgctgaatctttgttcctaaagatattgacataaacatttatttgttttattccacaatatgtttcataatttttttttttttttttgagacagtcttgctctgtcacccaggctggagtgcagtggtgcaatctcggctcactacaacctccgcctgtcgggttcaagcgattctcctgcctcagccccctgagtagttgggattacaggtgtgcagcaccatgcccggctaatttttgtgttttagtagagacagggtttcaccatgttggtcaggctggtctcgaactcctgaccttgtgatctgcctgcctcagtctcccttcataatttttaaataataaaaccaacaatattgttaacaagactactgcgatgtagcttaagatatttgtttcttttgtccttaggctatatcctactagggatacgtagtcaaaatgtcatgtttaagtaattcacaagaattattctttgtgtaatatatagttgattcagttagtatacttgtttgctttcttttttttattttgagacaggttctctgtcactgaggctagagtttagtggtgcgataatagctcactgcagcctcgaactcttgggcacaaatgatcctctggcctcagcctcctgagtagctgggactacaggtgtgcaccaccatgcccagctaattaaaaaaaattttttttttttatgagagtgtctcactatgttgcctaggctggtcttgaactcctcggctcacataatcctcccaccttggcctcccagtgttttgggattacaggtgtgagccatggcacctgcctgctttcaaattttcaagggattgctgttttgggggtttgacttaattttattttttaattactagggcctttttgttctcttatttatttcagaatcagatgctgaggctacccaggaattggcagcaggacggagaaggacagtagggatactggatatgggaggagcctctctccaaattgcttatgaagttcctacctcaacctctgyccttcctgcaaagcaggtactttaccttttagggaaatttagttgctaggaatgctagtatttgagaaggaaggacactgtctttggacttagaccaacctacctggctctaaatatttgttcagatacttgctagcttgcgttatcttgagtaggttacctctctgagcctcagcttcctcctgtgtgaaaaaggaataataatagtatctacctcataaagttatgaggatgaaataataccatgtttgtaaagcatttagcaaactgtccagcataagtgttcratacattttaacaattataactatactaggtatctcctgccattgctgaggataaacatgataaygcatttacattctggagcacagtatttgatacatatctattgttcaataaatgttattccctttccccttactgatgattccattctgggccttctaataatccttaccccactagaatgtaaagaatgtattttgagggagaagtttcatcctacacagacactttttgtacagccattatgtacacctattatgtacacccattatgtgcaaggaatagacaatattatgtacaaggaatagacatgtgagttacactgtccctaaaaacttataatttatctgtcagtggagacagcttgtgatatcagggagactgtagcagtgcttaacttgatctaaaccagggcttctcatcgttggcmctcttgacattttgggtcagataattctttgtcatcaggggttatcccatgcatcatatgatatctcttgcctataccagatgtcagtaacaaccctcccccttccagttgtgacaatcaaaagtgtctccagacattaccagatgtgtggggcagggtggaaattgcccatcattgagaacatctggtttaaacagagagctgtggcaatatggggactggcagccaacttagyttgcaaagttgaatgggagccattcttgcttcatggaaggtaaagtatttacctgggccttggatgagagtaggcttttttttttttgcagagtggaggctgagggaaggccacctgcatggagggaacactatatacaaaggcacagaaaaagcarcacagaggccagaatgtccagggaatgacgaatagccttttgcagtataggattttcaggtgtgctagtagttaagactgggaagataagmtggagctaaatcatgagcagtattgagtgctatyataaggggactggcttttatttccatagatagtggaaaaccaccaaaagtttttgagtaaggcagtcacatgggcctcagtttcatttataaaataattaaactgtgaaggtccttctcagctctgaattttgtgatgatgtcagttgtgtgactgtgatctgatctttttgtagtgaaaaaatttttgtgtcagtaggagaaagaatataggtcacggaaccttgagtgagaagtaataaagggctgagttagacaaagtaagtggaaatgaaagggaggggacagatttcaggggatagtttggagtgaaaacccaatgtaattgagcgattgattgtggtagtgtgagtagggtgggaggatggccagcagtgctgaggatctatcctagataaccagaagactgaggaacccagtaactgagagaagagcaacaggggtaagggcaggggtgatattaagcaaacagtattgtcctgagagatctggatgagagcgtctatctggtcttctagttcagaagttgtaaaactaatgacttcaattttggatatattgagtttaagatayccaaggaacatatatgtcagaatatccacaggactgttggaaatgtgagtttagcagtcagcagagaatttcatgctggggttggaaatgtgggggactaactaggttgtgatactttttagtctatattcgttagtatgtatttaacaggtaaaacgaaggcatggatctgatactaagaaataggtgacaagygggactggggcttcaagtcttaaagaaatgacttttgtgtgtgtgcagatttagaaaggaacatggttatggaaagcaacactggtacggaatgcatacttgcaagcaacaaattagatttacatatagcaggccgggcacggtggctgacgcctgtaatcccagcactttgggaagccaaggcgggtggatcacctgaggtcaggagtttaggaccagtctggccaacatggtgaaaccccgtctctactaaaaatacaaaaattagctgggcagggtgggcaggcacctctaaccctgctactcaggaggctgaggcaggagaatcgcttgaacctgggaggcagaagttgcagtgagccaagatcgcaccactgcattccagcctgggtgacagagtgagaccccatctcaaaaaaaaaaaaaatagtaactacacatagcaatataatggctcttcaagatgaatcttagtgcttggtaaaaatgaaagaaactgtgagacaatggcatttaaaacattttaaataatcctgaatgcctaatatatttttttgtacaactcacaaagttatrtacattcacaaagttgtgcagccaccactattgaattccagaacatttcatcgccccaaaaagaaaccccatattcactccccactcatttcccattagcagtcactcctcattctctcctctccctacccctgacaactattcatctactttctctctccagtggatttgcctattccggacattttgtataaatgaaatcatacaatatgtggtgttttatgtctggcttcttttatttagcaaaatgttttcaaggttcagccatctcgtggtatgggtatttcattcctttttaatggctraacagcattccattgtatgaccaaccatgctgtattttgtttatccatttatcagctgatgaacatttcagtggttttccctttttggctattatgcacagtgctgctgtgaacattcatatacacatttttctatgtacataagtttttttgtttttttttttttttgagatggggtttcactcttgtcactcaggctggagtgccatggcacgatctcggctcactgcaacctctgcctcccaggttcaagcgattctcctgcctcagcctcctgagtagctgggattacaggcacccaccaccatgcctggctaatttttgtatttttagtagagacggagtttcaccatgttggccaggctggtctcgaactcctggcctcaagtgatccaccctccttggcctcccaaagtgctgggattataggcatgagccaccatgcccaccccagtttttggatctcttggtatgtaccttggagtgaaattgcagggcacaatggtatttttcacaaattaaaaagaaatacattcaaaacaagaatcctcattttataataatacacatatacaaaaattatacataacacattagaatggttgcccatggcagagaatggaatgagattaagtatgaagataaaagagaataaataaataaagcaaaagagaggctttgccatgataatgtggaatgagctgaggaatatgattaattcagcctctgcccttgaggttcaagaaaaaaatatagcaccttttcattggcggtacaataaaattgaactttcccaatccccaaacctgtcataaggaaccttagggcttcttggataatgttagaaaaggccacagaaccgggcacagtggctcacacctgtaatcccagcactttgggaggctgagaagggctgatcatgaggtcaagagatcgagaacatcctggccaacatggtgaaacccgtctccactaaaaatacaaaaattagctgggcatggtggcacgtgcctgtagtcccaactactcaggaggctgaggcagcagaattgcttgaacccgggaggcggaggttgcagtgagccgagagcatgccactgcactccagcctggtgacacagtgagactctgtctcaaaaaaaaaaagaaaagaaaaagaaaaggccacagaatagatcttatgatgatccacagagttccttaaatttatttttattaaaggattttttcctattaaaataacacattcccattgagggaattggaaaatacagaaaaatacatgtgagaaaatgatatctgtagtaattctacctcctatataactacagatagtgttttgggtttctaatttcatatttagttyttaatttagtgtctaatttgtaccttttagtgcagtcttgtcattttgtgtctttgtttaaaataatgctatgaggatgaaagaatgcttaagatgttttaaagagtagtcatagaaatgaagcctcgtgtattagcaatgtcatagctttctagaaggcaaccaaaactaaaattccctttttctcttggtattgtattataggaagaagctgccaagatcctgctggctgagttcaacctgggctgtgatgtgcaacacactgaacacgtgtacagggtttatgtcacaacttttctgggtttyggaggcaactttgcccggcagcgctacgaagaccttgttctgaatgaaactcttaacaaaaacaggtacatttgatatgggatctgagtttctgaaatataatgtcaggctgcagatattagggagaaatactcacatcctcctaagacagataagtccctgcttcctccttctttctgactacccctgccaatggggtagcatctcttaaagacctctattagcagtcccactctgggtgagggtgcattctgatctttgttattaggactcataaagtacagtagcttattgtgatctcttgctgtttcccatattcagacctaacatcatgggaaaagggagatgaattaaattgccagtttaaaatgtacaatatatagtgtagctgctagcagttccttctgcatggaagtgttcaagacatgtttgttgaattacagtgcagttgcatcttttgtgagagttcagttctgtagtatgtctaaaagataaaaagcaagcatagttaaaattaacttttaaaatggtctctcatcaaattcataatagtcagtttttcctttagcattggacagatcacagattcttcatttgagtaccagatgaagtagttagaccttaatgtacaaacagtggtgggatttcttgtttcttttttgttttttaagtctgtaaaattatttattttatcattaagcacactgaaggaaagcataagagaaagcagagttcttttccatcattaaatttacacaaaattttggaatgaaaccagtttaagtaattgggtgattgattgtggtggcgtaggtagggcagggaggatggccagcagtgctgagggtctagcctaggtaaccagaagggtgagaaacccagtcacggagagaaggaccacagatgaaagggcagggctgatactaagcaaacaacacacttacctacgtatacttaaccatttagctacgaacactagcttgaagaagtactggtataccccgtttgtaataatttatccacagcaatcaattatcttatatttacggcatgttgaagaaaatattgtcccataagtctattttgtttttgtaagtcttagtctctaggagttcaaggtgctttgggagaatcctggtgccctggatgattgactaatgcattaaaatcaagtggtgtgtttgtattctgaaagtactcctaaatctatacaaacattgcttgggttgaggtgctcagatgtctcctgcaggcaccatgatgtttgaagatcatttgttttgaaagtttcacaccagttttggttttccttcttcattagctgctgtgcttccttttccrttttcttcttttgttctactcctttcttttctgtctgctgttttctgctgcctccaaactacttcttgccagactgcatcttcttcccatgcgttggtattttcttgccaagtagctaagtcacctacatcaggtgactgatgagtaaaaggcatatcttgtgtagctgccagtctattaacctatttcctgagatggcaaaatgatcattgtctcttctcaataacaattttctgagttttccttacagttggtgtcacatccttaaaatagtcggttccagttgttgtaaagtgttctgttgtactgcctcattccattctcaccctcggtctttacacctgtgggcgcatcctcattctaagaagtccactcttcaacatctgtctgtttaggaactgatgaataattaactgcaattggcaaagttacttggaccccaacttaatttctgtccttggacagatcttcatactcatcattttgaggaatgagaatatggttgctaggcaagtataaactcaaaataactggacctgtgttacggccatggtgggaatcaaagctttccagtcttctccccactcagaggctccaggctctgcaggtggcttcctggagctggtgctgtgcctgttctgttccagcactgctcattcagaggcaggcatgggctccatcaccattgccagccattgcacatgggccactgccgtggtctgctcttcaggaatctctccccacagtccttcccacctcaccccctaccagttgtatttttaaacattagaaccacattccgcacgataaggtccttgcacttttaggaggtacgtgggaatgaagaccagatggagaacagcagattcacatctccaatttcactacagactaggaaatacacatgttgactaaaatgtcgaacagaattgatcaccatattcctctcttttttttctaaatttaacttgctgaagttaaatgtttatgtgatgaaattgcactccatcctcgtttctagagatatcatgaaaaccagtagtaagatatttctgatgcacattgtgtttcttagactaggttgaatacaggcatgacgtgtttgtttgtttgtttgtttttgtcattgtggcagattgcttggtcagaagacaggtctgagtcccgacaatccatttctggatccctgcctgccagtgggaytcacagatgtggtggagaggaacagccaagtcttacatgtccgaggaagaggagactgggtgtcttgtggggcaatgctgagccccctgctggctcgctccaacaccagccaggcctcrctcaatggcatatatcaatcgcctattgacttcaacaacagcgagttctayggcttctctgagtttttttattgtacagaggatgtgttgcgcattggtggccgctaccatgggccaacatttgccaaggctgctcaggtaaattattaatgataaacatggcttatgctggcagcagccatttattgaatgcctcactctgtgccaggtgctgtgcaaagggctttgcatacagaatctcacttgttctttgcaggagccctttgaacactcattttacagatgaggaagtggacagagaacttaaggatctagctatgctgtactgccttctaattaactaaatttattttccatggatgtcataccacccaaattattacccaggcataaaatttttgtgttggctaatggtttttcttccaactttccaatagtcttgtttaatgtttatgcccaagaaatgtcacctccagtatttttcctcttgctagctattttctgttgtaatgtgcttttggagatgatatcacccagaggggcaagcccatctttcttttggkttgaggtattaagaggcagagtggtatggggtccctgggaatattagatgttgtaaaaagcaatgatggtggaagtttgtttagatttaaaatagaggagtaaaaattcactctgagcatatataggacttaagcatcatataagtttaaatcattggtacctggacagatgaaagtttagccagctttctatcattttctgctttatttagggccatctctttgaattgttgcgtgtctctatctttttcatcagagaaacgaatgggagaatctgtcctcatatttctttttttcttgagatggggtctcgctctgtagcccaggctggagtgcattggcatgatctcagctcactgcaacctctgccttccgggttcaagtgattctcctgcctcagcctcccgagtagctgggattacagatgcccaccaccatgcctggctaatttttattatttttaatagagatggggttttgccatgttggccaggctggtttggaactcctggcctcaggtgatctgcccgccttggccccccaaagtgctgagattacaggcgtgagtcaccgtacccagcctctcctcatatttccctccctccctcccttccctccttcttccctgcctacctttctctttctttcttacaattctctagggttctcttagtgtaaggcttccagcaaaataatatctgcagtatctgtactgttctgttcccaaaagacagtccttaagaaatactgtgggacacctggtttgtatttgctcctttctctccagcctccaggacgaccttcacgctccctgtttttctggagcccagagctccctaactatccatggcctgactctttctcttatctcaaaacttcttcaaattctattcccttgaacaccaaaaggctcaagttattgggcttaacatattatcttttccaggtaaaagcgatttttttcccttacctttttaactttgactcaaacgttatcttcccagagccaccttctgggaccactctatccaaaatgacaacgctccccatattacctgttgccctttcctgctttatttttccctgagcatttatgttatccaacgtaccgtgtgtgtgtgtgtgtgtgtgtgtgtgtgtgtttattgtctgtctcctaccactagaatgtaagcttcctgaggacaggaatttttgtctgttttatttactgcatgattccctggcatctagaacagcacctggcacatagcagacatacaaaccaaaaggaatgattattttggtgagaattacaacaccgagggaggccaatgacaggtttctaaccatcctcttccatctgctctccstgctcatgtcagtcctatgtggagtagaatgaaactatctttgtcttttgacgttgctatttgttagtcctaacctcagcccctctgaagcctaagaggctcagaagccacatcaagctggcttggtgctagacatgggatgacgggaataaacaggggtatgacgcagtgtttagtgaatgaacacaccatttctgttttcctttgtcagctggtagcccacaagtaactttagaaatggaacagctgtgactgtggggaaggtagagagtttgcctccaaattcatgttgcactatttctctgtggttgatccaggattactgtggcatggcttggtcggtactaactcagagattcaagaatggcctcttttcatcacatgcagatgagcatcgactcaagtaagttacttccctttcctccttagatgtggacttaaaatctagatggcagattataatggagagtgagcaataatgcagattagatttcatgttgagggagcatttgattattccagacttgattttctcagggataggggccaaaatagtgagcctattatagcaaagccagaagaaatcagtggttaccaaacagagttctcawcaagtgatttgacaacaaaagtgatttttttttttttttgagacagagtctcactttgttgcccaggctggagtgcagtggcatgatcttagctcactgcaacctccgcctcctgggttccagcgattctcctgcctcagccccccaagtagctgggactataggcacgtgccaccatgcctggccaatttttgtatttttttgtagagacggggtttcgcaatgttgccaggctggtcttgaactcctgagctcaagtgatccgcctgcctcgccctcccagagtgctaggattacaggtatgagccaccgggcccggccaaaagtgattttttttttaactttgtattatagataatatcaaacatatagaaaagtagagagaatagcaacataaaccctcatgtaactatcacacagcttcaacaaataacattttgccagtatggttcattggtcctttcatttttaaatgttttagttaaaaattgtttaaaattgccgggcatggtggctcacacctgtaatcctagtgctttgggaggctgaggtgggtggatcacctgagttcaggagttcaagaccagcctggctaacatggcgaaaccctgtctccactaaaaatacaaaaattagcagggtttggtggcaggtgcctgtaatcccagctactcgggaggctgaggcagggagaattgcttgaacccaggaggtggaggttgtagtgagctgagatcgcgccactgcactccagcgtgggtgacagagtgagactctgtctcaaaaaaaaacaaaaattgttttaacataaacaaaactagaatagtgtaatcaactcctgtgtacctgtcaccctgctttcctactaacatttatcagctcctggcccatcttgtttttatctgttttcccatccacaatccccctcttacttcaactgggttgttttgaagctaatcccaaacatcmtataattacatttgtagatattttaatatgctctctgaagatagggactcttaaaaaaaagaaaaagaaaaacacagccacagtatcattattgcctttgtggtaaacacaagataagtaggctgacttagaaataacccacttagaggtgaggaaggtgaagcgggaggaggtaggtcttttaataacttgtgggaatayggagtggcttattgcaaaggaaagtattasaattcttttctctttttttaaaatttaattatttttgtcacacagatatcagtgttttaaatcggcttggatgtaccaagtcttacatgaaggattccactttccctatgactacccaaacctgcggacagcccagctggtgtatgaccgagaggttcagtggacgctgggagccattctatataaaacacgattcttaccactcaggtaaagtaagactgaccaatctggtatcttgagctcagaggatatcagttgatgcctcagaatcggtttctttctttttttttttaaccagcttagaataggtcttaagtgaccttcctctctaccccctcacaaaaacaaactcctttacttccatgtgagccactgttactaccaggcatgctcgaacagaaagaaggttgagcattactggtctggagtctcagctttgctgtttcagaaatccagctttatttgtttactcacaacaaaccagtctttaggactgagctcttactaatcacttccaagatactgacaagctaaaatgtcattcttgggttaccctggraaacacatctgactaaagaacaggggtaggatgtctagagcaatctttcataacatacagaggcactccagacattgtgtcattgacttagaaggctttttggtgggtcagaattagaataaaggacgtgagatgtttttagtggggctactttcatcaaactctggtagcctgataccttacttttatgtactgtcagatatttgggacaatttttaggtactctgtaccctggactatttcagataaactcagatgaattttgtatctttgatgtctgttcctctaaactcaataccgtcagcagccaggcaggcgacagaagtgagggaagtgggctaggtgggggttgcccacaactggagcatgtatcccagttaatgggctggttactgtcacrcacaagcactgtcccagcatttgccagttctcatctgtccagaaaagtcagaaatccatattttttatgaagtctttcagtttagagattcgcattctagaagaacactgcaggtcaaaccagacaaaactagatctggatctggactgctgaagagtggcttctgttctagccaggtggaccattacacttggttttcatatcgccttatttttatctgactgtaatacagttgatcaggtaacagctttatttagatatatcctagatcctaaggaaacatagtacctttattttttattatttttttgagacagggtcttgctctgttgcccaggctgagtgtggtggcagtgccgtgttcatagctcactgcaaccttgaactcctgggctcaagtgattctcctgcctcagccttctgagtagctgggaatacaggtgctcgccaccatgcccagctaattttttgatttttcttttgcagagatggggtcttgttatgttgaccaggctggttttgaactcctggcttcaagcaattctcctggcctggcctcccaaagtgctttgattacaagcatgtgccactgcacttggctgcatagcaactttaaaaaaaggatttagacacacacactctgatttctttattggattcaggggataccctattctcattagtactgtatttataagccatattttaagacttatgttacaggtgatcaatctagcctttctgttcattttttgggattcaatttcaaaggccttcccatcttggcttagattctggagggtgtaagcctggaggtcccttctgggggccgtgggaaggaagacacagaagggctcctggggcgggggatgttcttcagctttgcctgctctgtggagctggtgtcataaaatgtttatgtggatggaataaatgtgataacactactgggcctttcaaatcagtaaatgtctccctttgaaacttaacagttttttccacctacaaattcttaattcttccctagggatcttcggcaggaaggtgtccgacaagcccatggtagctggttccgtctctcctttgtatacaaccactatctcttctttgcctgtatcctggtggtgctactggccatcttcctataccttctgcggctackccgaattcaccaccgacaaacacgagcctcagctccattggacttgctgtggcttgaagaggtggtgcccatgatgggagtacaggtggggccgtgaggctggaccaggactagagaagcttgagcacccccgagttgcygctcattgaattcctccactttcttatatagcctcagatgctgtgatgtctgaccttgtggatatttgcccttggaatttctactttactttctaccgtaattccttctccgtacccaggtcttctctgagagaagctataatttaatctgtgaggaactaaatgacaggagattggtgctaatacgggggaccaagctttgtccaagtgaagcaggcttcgactccttctgagaggtctggtgtgttcctagaatctcaccttttcttcccttgctaaagcatgaagtttggcatttggcacactggaagcctggttgaaatgaaatttgtagcatctgatacaaagccagagacattctagcaagtgcagcagccccttctttctctgtaacagagatatcatttatgtggagatccacaacctttaacagggatccaagatctttgcagttcaatcgaccacataggaatttccaggcaccaaaatgatataacttccttgcttccttgacaaagaagccatcatgggtgtgatccaagatccctgtcgtagtgttgatgatgttagtacatgattttaaaggttagaaccccttctaaatgaatggtctgtggaagattttagtatcttatctgatgcctggtatgatgaggatagaaaatttttccatttttatgtgcctcacaggctgtttgggcattaattttgctttttgagccttaagtgtgttagtaggatggagaaactgtgatggggactgggaacctggatttgtctgattttaggtcactgttccctgggcctgtttttgtgagcccttacacaggaagatataaagagagttctttcatttcactgctaaaatcagtatgtagtatggggaatgtatttgggttgtttttaaagaaaaggggaacagaatcaggagagtgggcaaaggcaataaaatcaaagttcttattaattatttctgagaaatagaagtttctcaatttatgactcttggaatgtctgaaagggagcaaatttggaatagatcaatctgttaataagccatctggcaactttcagaacctctattaagagactgctgagtcacaaacagcacttccattaatgaagcgagaggaaaagccataataattacatcttcacccactacccttccagagctttgcttctcctccacatttagccattaaattgcatgaggatttctcttcatcagggtccgcatggaatctttcttatattttaccctttcctacatgtagccttgaatgtcctttccacgaatatgctcccacggctgggagcattttcttttcttttcgtcacctttgatttttgggattagattaataggggaaaaagtccctggctttaaagaaaacaaaagtagaattcttcaaaaataaatttcatactgggaacagaaaggaactaaatgcttcataaaacagggaaaaagaaattaagatcatcctagaaataaactaagataaaaataagtatactgacccttggttggtagataaaaagatgaccagtcttgtattgttttaaaattagataaacatggattaagcatgcaaagactctgttcctttttttttttcttggagacagggcctcacgctgtcacccaggctggagtgcagttgtgcaacatcatggctcaccgcagcctcaacctcctgggctcaaacagtcctcccaactcagactccagagtagctgggactacaggtgtgcgccaccacactcagctaattttttattttatttttttagagatggagtctgtgttgtccaggctggtctcaaactcttgggctcaagcaatcctcccacctcagcctcccaaagtgctgggattacaagcatgagctactgcacctgccctctgtttcctttggaaatctcttacctttcattagggtttctttcatagcaatttcctttggtttttaagacttctacattgctttttcttttattatctgtgctccgtgaaccttatgaatgctgcttaaaaataatgtcaaaatatgttttagctgcctactcaggtaacgttttcttttgctctcatcttggtttccatatactatttttggttttttgtgagatctaatcaatgatctagtcagaagctacttcactggctaacagtgatcatgttcatgtgctaaaaatgaacttgaaacacggaagtagtggttggtccagtttgaaagctcttattagtattcttcatcctggctgtaataatagccattatttgttatgcctttgttatgtagcagacactcttaaggattttatgtgtattattcaaattgctattactgttctttttatagttgagaatctcaggatacctacatttatcactttttcaatatatatgtatttcttattcttattttgtcttggagtgtttaatgtgttatttcctgttcattactttaatattatggtatctaggcttgtctttattaccatgagcaaggtctccaggagttccacagtactgaaggaaaattttgtcatatccctcagaagaactgaatatttattattggtatgggctcctttgtttattctcttctcccaattaatagattttaaatgaaatcttattagctagaaacaaaagccacttactccttgctgagagccaattacttaaatatatttcttccttataataaaataatttgcttctaggagcagaaatctatcttgccataccctttggtttttaaagatttctcttctatttgcatttctgcactttggtggttctcccatgaagataattatggtgtcataaaattcacattccactggttcctttgaatcttaccaaccactcttgttaacagagacaatgaacctgaactgttttaggactcttgttattactgagacaggtcacaaacatcaaaataggagtccgtggcttgtagtgatgctttttagtcttgtgatagcacaatccatcactttccccaaaattcttgtcatagaacataatgaaaaatatgtaaaatacccatttatgtggcatttcattcacttaagttgcagttaactctaagccaaattataccattttttctctctgtactttagctccttgaatttccttaatctgggaaacttttgttcccacaccaaggaacaaattcagggggtacaagtgcaggtttgttacatgagtatattgagtgatgctgaggtttggggtacagatcccatcaccaggtggtgagcatagtacctaacagatagttctttaatccatgccctcctctctccctccctgctctagtagtccacagtgtctattctggtctgggaaattttcatcactttccaccaatcttctatttattctccaaatgtcttccaaagtatcctgccccaccccctcctcatcctaagagattcctttaacttcaagatcatatccagtgattgctgaaaaatgtctgccatgcacttgctaagctagtgtttttaggcattaacatttattatcacatccatatttatatttttgaaataatttatacttctcactgatatcatctaaacagatgcttctcacagttttatgttttgttttttgtcagggatgaaagacaagtgagtggtatcacttaagggaaagaacagtaggcttaacgaatagcagacctggattctagttctggctttgtcatttactagctctggtaccccaggccagtcacttaccatctctggttcggttctcatctatcaaacaaagaggctagacaagattagaaactaaaggcagaagacaaggtagaaaaatcatatgattttgggaagagcattttgtcctttggtttagaagaccaggctgcccaaaagagcctcctattttatccataacccctgatgataaggttggtgggaacagagtttctaatagtaatcataataaatttcagaagagttttaaagcttctggtcaacccccttgatttatatgggtgataaaactgaggcctagagcagttgtaatatgtgcaaagtcatagtgactggcctcctagcccaactactttgtcagctacaatgaaatgctcattaacagaatctttctgcaagtataaacagaatctattttttataaaacagctggccacaactaaccatgccccatctttacaactgcttctgacattcatttatgactgctttgctcacatttaggaataaactttgaaaaaaatactttgtcagaaatagtgccaagttttcactacatctattcttgttcctgtatttcttttcgtacttttaaattttatacatctttttaaaacaattttatacaatttcctttactacaacatccaagcaattcattagatgactacagcctagatgaaggtataaatgcctattacatctacctcattaaagaacttcgttgtaattcttgggcagtttccagactctgttacagaaacagagggctgtttctttttgttgtctttaaacttttcaaattaattcaaaactagtatctaattgtcctttttgctgtggtatgtggtgtaatgttgattgggaataagaattatggtagaaatagcagatgtttcaaattctcccatattagtctcttagggacgctagctccagattccagcccctggggcaataacttgtgaggattttcctggtgttacaaaaaatattgctgttaaaaaactaagactcaaaaccaaaagttgtgattaataataacaggattattagtcaataatattttgattaatactatagaatagcaacagtgaatatacctcaaattgaaaacttttaggttgtgttcttggctcattctctcataacctggatctaagttggaaagctgtggcaccctgtttgggtgtcccatctaccctgttttctgtttctgcagatggcttgttcaagcttcattttaagcctgctctgtctacttatcttccttatatcctaatagacttctcttgtgttattacacatttctcttttgctctaatatttcattattttccagtttgtcagtaccgttatcagagggacgaggaaggaataacacaccagttgaccattttgtttctctgaaaatctgagcaatacggagatccttttattagtaaaactgaatcattactcatactacaagggctttcacttttaaaatgtaatccatcattgcttgccatttttatgaaaaccaaagttgaaaagtcttctgaatcacaggctatgtatagccacacatgcatgacttcaggctagcataaagacatgtctgctcctgagcctcttcttttaaagggcaaccacttgtataccctctggtggccactcctccttctccactccaaggcagccctggtactttcctaagtggcccctcctacagagcacttgccggcatttggcctgctgctggtgaagacgccccttactagcttcataaatgtttttctgcaagcagggatcccagacacatactttggtttctagtgtttcagttactatgttgtatttgaaattctcattccacaattaccctttagttgaagtcctgaagtacatgccatgtactccccctttatttctaccttgatcaatggcctctgcggagtgtagtgaaagacatctttttattatgatctacactttaaaaaaccaaaggctgcctgtattacattgctttggggagttgttaagactctgttttttctactgcttcacattaaacaataattttgttgaattttgaattcttaaaattctcactgacaaacattttaggtcagtgttgaggaaaatgtgtgatgcatgttagagaggtgatgcattctcccttatgcagggacatgggtatatgtgttacatatgctgatatataacccaccattcatcccaggaccacaagggtagctgtagataaactggttatcctaaaatcatgattatcagtgttgatctctgcaaccaacattgctttagggagttgctagtcattacccctgctacaatagatagtatttgtcagtctaagttacagacaaaaaattctaggttgactgattaagaaagccatgtgttttaatttccttcatgttttaaaaacaatggacgtaagtgcagagagacctttgaaaatattaagggaaatctatttaatcctataggtatgtgatgacttgtttttttggaaaaaggtatttggaacatcaatctgtaattatccattttccattcatgcattcactaattcaatatttgatatgtgtctgggagtgctgggaataacataaatacaaaaaaaaccctaagataatcattcaccagaagctcatagatataatacagttatatagctaaatgcaaccagttgtttttccaaatgtactcatcatctgtaataaaagaaaaatgaagtaaaacatctgaaaccttaacttactcatgagttgctacttccttggaggcaactgtagaagcattaatatatggttctttgggttgggtcatactgccctctgctgactcagttactaactaaggacaacctgggtttgaggatcaggagaggatggtgtgggaacctgcctcaggaactacagttccctttctttgaaggattctatccagaagagaccatatcctactaacatactaataggagcaacatagcagatcaaatgataaggtggggtggaaattagaagggaatgggaataagctagtcagaactttctaaggtaactaggctattaggacctaagccagtggtccctagacttgtctgcacattggaatcacctggggaactttaaaaatatgccttttacttcctccagggattgtgacttaattggtcttagatgaggcttgggctttgggatttttctaagattcaaataagaga

SEQ ID NO: 94215 - DNA, 21085 bp, Homo sapiens
ttcatgactgcttccccactcccatctctcagtggctaagcttctgccccctcacccaccagagccaggaagactgacttgggcaatgtcccaccagtatccttgctttttctgggtcttcacctattctctttctttctcattttttatttccatagatttttggggaataggtggtatttggttacgtgagtggtgatttgagagattttggtacacccaggacctgagcagtatacactgaaaccaatttatagtcttttatccctcacctccttcccattcttccccacccgagttcccaaattccactgtaactttttttttttttttgaggctggagtgcagtggtggtgcgatctcggctcaccgcaacctccgcctgctgggttcaagcaattcttgtgcctcagcctcctgagtagctggaattacaggcacgcgccaccacacccggctaattttgggggtttttttgtttgtttgtttatttgaaacagagtcttgctctgtcccccaggctgaagtgcagtggtgcgatctgggctcactgcaacctccgcctcccggcttcaagcaattctcctgcctcagcctcctgagtagctgtgactacaggtgcacaccgccacgcctggctaattttttgtgctttagcagagatggggtttcaccgtgcttcccagactggtctcgaactcctgagctcagtcaatccacccaactgagcctcccgaagtgctgggattacaggtatgtgccactgcacctggcctaatttttgtatttttaatagacacggggtttcaccatgttgaccaggccaatctcaaactcctgacttcaggtgatccacccacctcagcttcccaaaatgctaggattacaagtgggagccaccgcgcctggccccattgtatcattcttatgcctttgcatcctcacagtttggctcccacttatgagtgagaacgtgtgatgtctggtctcccattcctgagtcacttcacttagaataatagtctccaatcccatccaggtggctgcgaatgccattcattcatttctttttatggctgagtagtattccatcatatatatatgatgtttatccactcatctgattggcatttgggctggttccacatttttgcaattgcgaatctgcccccacccccaatctggttaaattggatttgtcctttaagattccccgtgattggctgggggcagtggctcacacctgtaatcccagcactttgggaggccgaggcaggcagatcacgaggtcaagaaattgagaccatcctggccaaccaacatggtgaaaccccttctctactaaaatacaaaaattagccgggcgtagtggcacacacctgtagtcccagctacttggcagactgaggcaggagaatggcatgaacctgggaggcggagcttgcagtgagctgagatggcgccactgcactccaacctgggcggcagagcgagactccgtctcaaaaaaaaaaaaaagattccccaaggttgtcccttgttctgtgaagcctcctcccctcctcacacctacttgcccatctcattccctacactgctctgtggcagctcactctggcttcgtttgtgtgcttgtcaactctattttcagattgtgaatgactttagggcacagacgatgtcttgctcctcttcaggtgcctggctcctactatacagcctggaacatagaaatgtttaaaaaatatttgctgaattaaatagaaaaaatgaagaaaaagaaaaaagaggcacctggagatgttttgtccaggtcttagctggtggaagggaccttgggctgtgagcgtgcttgagtctggtctgcccagctggcagcccccacaccaccctgcaagtccacatgggatgaggggcacccctaatgtacccaactggacgtgggggccacctaccagacacgcagcctatgatagaatctcctgcccctcagaacctcaacgccagtttctgggatgctgttaatgccctcccagccctttacacaacagatactatacacagcacggacagaagaaattgatcctttgacgtttccatttcctaagagttttacaaaaatgactttcgggccgggcacagtggctcacgcctataatcctaacactttgggaggccaacgggggtggatcacttgaggtcaggagttcaagaccagcctggccaatatggtgaaaccctgtgtctattaaaaatacaaaaattagccgggcgtgttggcacgccccggtaatcccagctactcaggaggctgaggcaggagaatcgcttgaacctgggaggctgaggttgcagtgagccaagatcaggccatttcaatctacactcgagcttaggcaacagagtgagactccatctaaaaataaataaataaactagcctggtgtggtagtacacacctgtagtcccagctactcaggaggctgaggtgggaggactgcttgagcccaagaagtcgaggctgcagtgagcgatgattgcaccactgtactccagtctgggcaacagaatgggatcctgtctctaaataataatagaattacataacaaaacttttttgggtgataaaaaaactcctaaaactggataatggtgatgctggaatatcgctgtgcatttactacaaatcattgcattgtacacttaggagaattttacagtatgtaaattttatcttaataaagtttaaaaaaaaaccttccaatggcttactatttcactttggctgaaatccatactcatttccctggatccctgcatgtacgatctggccttgccttggccctcccacttcaaccctgctcaccacctccaacccctcccccacggccctcctctcccaccaggtggctcttcctgctgcacctcccaagctgtttcccacttcaggctctggcccagatctgcacacagccgcatcttttctttccttcaatcacagtctaaaggggcttggagaggcttccctgccacacctgcaacatccttctctcgcagtcctgccctttgcttcttgcattcatcacataactgtttcatgtctgtttccccttgaaaagctaagctccatgaaggcagggatcagctgcaacggagcacatacgaggtgctcagcctgttgaacacacaaatgatggtagaactcaaatgaggatgctaagaggggacaaaagtattccaggctgaagagcaaaaaagaaaacccttggcttcttagcagctttggctagaactgtggatatgggctgctctgttcaaatgcagaatttctgtggcacccgttatgtgcttagaaaaacttggcaaaggagtagcaaacctcaaagtagggagaaaaccaaagtcagaacttgccaaagactgcctgttcctgcaactcctaactgaggcagaaaaaaagagcgcttccggaggcagggagtaggcgtcaggcctgggctcctctgctggttatttttagcagcccaatgcaaagctcagaaagatatactcccttcacatcaatatattggtcatttaagcctctaggaggagcagtcattttgtacatggttaaagtgaactaggagcgtcagagctgttcccgggacccctttgaggtccctgaattgtattagtttccaaaagcaaggcatcagcatggccatgttctctgtcaaagctcaagagtctctcccacgcctctctcctagctcttggtggctgctagccttctttgcattctttgacttatgactgcatcagtccaatctctgcctgtgttcatatgagcttctttcctctgtgtgtatttgtgtcttttacaagaacaccagtcagattggattcagggcccaccctactccagaatgacctcatcttaactaattacatctgcaaagacccaatttccaaacaagttcacattctgaggttctggtaaggacatgagtttggggggacactctctaactgagttcactaaccctcaccgtggactggctcaaaggagcagtggctcaaagaggggcctgagatcaagcaccagaagtgctgactgtggatgaaaaggggctggcctggcccctatctgtgtccccccatacctgtggtagtgagggagaaggaaaagaaaaatccgttggggaaaattctgacctcagaagtggcctgcctgaaaagtcatagaaactggcaaaaataaagcaacctgggaaaaaactcaggctggacctgcacggagataagcagacagggtccagcgcagaagccctttgttctttgcataattagcaggctcccgggaaaaagtttcctctccttttcaggcatatacacagtgggctccatggaaaccggcacagggaggagggggccttatctaaaacaaacccacagttacacaaacaagagaagcagcgatttgcacttgcctagagacatacccacagctgcataacataaggggagctgcacaggcagttttactggtaagaagttactcagttaccaggaggagagcagtgtcctataaaagttttttgcggccaggcacagtggctcacgcctgtaatcccagcactttgggaggcggaaggaggcggatcacctgaggtcaggagtttgaaaccagcctggccaacatggtaaaatttcgtctctacccaaaatacaaaaattagcagggcgcagtgacgtgtgcctgtaatcccagctactcgggaggctgaggcaggagaatcatttgaacccaggaggcagaggttgttgaggttgcagtgagccaagatcgcaccattgcactccagcctgggcgacaagagcaaaactctgtcttaaaaaaaaaaaaaaaaaaagctttttgcattcagctgtaacccgacaatccactcggactcccgtctccactttggagagctttcttctttcccttattaaacgttcgctccaaccccacccttgtgtccacgctccttagttttcttggaggtaggacaaagaaccccgggactagttcagacaaggagaaactgctatattaaggtgcactggcaagaccgcaacagtatcaagccaattagacttgccgtggctcctggaatggcccacgcactgcactggcaccaagacaccacccaaccctggacactgcactgggacaggaggcctgaagagaagaatcctctcaaaggaagcttgaagtacatgctacaaaataaactggcttctatactcagggccagcttcatgggctcactcagaaggtccctggcttgctgcaaccatttgctctgaccatcttgaaattcttaatagttttctgggttttttagtaagtgtccccacgttttcattttgcattgagtcacacaaatcatgtagctgggctgtcttcaaaaatgtcaaggtagtaaaagacaaaaggctgaggagccttccagatgaagagatcaaagagacatgacaactaaaagcaactcctgggttacagggtcaggggcggacaaaaaggaaaagaaaaaaaaagacattagagggacaattgaaggttagctgtggatgacatcacagaaatgtcaatgggagttgtcctaatgatatttgccctgtggttaagaaaatgcccttgttcttaggagattcatggcgaggtatggggtaaaggatcatgacatctgcaatttggttgccattggttcaggaaaaaaaaaaaacaaagtacaaatgattgagtaaatcaggcaagcctaaaccactgctaaacatgaataacagttctacgagagttctttatgctctccttgcaacttcctgtaggtttgagattacctggagataaaaagttaacatcaccagcaccgcccgccagcccgccagccgaaaagagcgcaggtaattcagtccgagctgaaagcggccaccctgggacttgagtcacgtgaggcgagcccacatgacccgaggccccggtccaatatggcgacctccacgggtcgctggcttctcctccggcttgcactattcggcttcctctgggaagcgtccggcggcctcgactcggggtgagtgcagctccctgggccagcctggttcggggggtcccccctgtcctccgagctcacgaggacagccccctgagctcacggccgcccgtccccgcagggcctcccgcgacgacgacttgctactgccctatccacgcgcgcgcgcgcgcctcccccgggactgcacacgggtgcgcgccggcaaccgcgagcacgagagttggcctccgcctcccgcgactcccggcgccggcggtctggccgtgcgcaccttcgtgtcgcacttcagggaccgcgcggtggccggccacctgacgcgggccgttgagcccctgcgcaccttctcggtgctggagcccggtggrcccggcggctgcgcggcgagacgacgcgccaccgtggaggagacggcgcgggcggccgactgccgtgtcgcccagaacggcggcttcttccgcatgaactcgggcgagtgcctggggaacgtggtgagcgacgagcggcgggtgagcagctccggggggctgcagaacgcgcagttcgggatccgccgcgacgggaccctggtcaccgggtgaggaggcagggagccccgtgctgtcgagggcagagggcctgagatttgggttgtagccgtgyctccgtgttcaagtcacttaaccaagctgagcccctgtttcctcctctgcagaatggggataggaatcgcttccttgcagagtttattcatcatccagtatcattgagcacttgcttgtatcaggcaatgtgccgcgccccggtgagatagccgtgaacaacacagtctttgccttaacagccctcccccattactagaaaaatcaacaaaagccgggtaaatagctaacatacattctgattgctgtgtgtgcagcaaagcaaccaacggggtgaacccgttgtaaatagtgttgattttasggagggtgatctggaacacgcctctccgaggtgacctttgagtgggaacttgaagatgaatcactaagtgagccaaggtcagaactggaggaagagcgtttcagtccaaaggaaccccacgcacaaaggctcagaggctcaggggggcttgtgtgtatgagggactgaaaaaggagtggggtgtcagaaacatcaactcatcaagactgatgatttttttttttttgagacagagtcttgctctgttgcccaggatggagggcagtggcatgatacyggctcactgcaacctctgcctcccgggttcaagcgattctcctgcctcagcctctggagtagctgggactacggacgtgtgccaccacgcccggctgatttttgtatttttagtagagacgggatggggkggggaacgggggagtgggttcaccatattggcctggccggtctcgaactcctgacctcaagtgatccacccacctcagcctcccaaagtgctgggatgacaggtgtgagccaccacgccctggcaagattgatgatttgaattatttaaaattatcttaaaaattatttgagtctcaaaaaaaaagtatttgttgatgataaagcttgtwctgatcctgagtgggaccaggtgggagagagcagtggagaaacaaggaagccaatgamgggccgtaacagggatcaagtggtagttgggctgggtatggcctggggattgagggccatagatggatttgagctctgttgggggatggtcatttctgttaaatgaaacagactgtttgcaaaggcttgtggggattgtattgtcagaaccctgtccagcttcagctctgacaacagggagattcctagggctgttaagttgtcccagctacactcaggccccaggaggttcctggggcatgagggggaatctagcagccaggttgggatggctagggagaaagagcctgactatctgcagttgcccctgctggtgagtgagcttcccaccttccccggatccaggtacctgtctgaggaggaggtgctggacactgagaacccatttgtgcagctgctgagtggggtcgtgtggctgattcgtaatggaagcatctacatcaacgagagccaagccacagagtgtgacgagacacaggagacaggttggatggggaggctgttggcaacaaccctctcgagaaccaggaccagtgggctgggcggagctgttcttaagtctttcaacaagtattgagcagctactttgtgcccagcactattctgggtactggggattcatggggaggaagataggcttatattgaatatataggacaaaaaatagttatagaatatgctgaaaagaattgataagtgctcagaaacaaaaataaagttaggggaaaggggagagatggggaccggagctgtgggtacaggaagagaaaagtgaagagaaaaaaatcttcatggacctgcaacatcggcgtggcccaggagcttgtttcaaagccccacaccctcagacctgcagaatcagaggcaaggcccaagagtctatgttttaacgggcctccatggtgactctgaccgacactcaaggttgagaaccactgggatgcagaatactgggatggggacaggataccatgaccattttagagtgggcagtaagctaggtgtggtggctaacacctataatcccagcactttgggaggccgaggcgggaggatcggttgagcccaggagttcaagacctgcctgggcaacatagtgagacctatctctacaaaaaaaaaaaatacaaaaattagccaggcatggtggtgtgtgcctgtagtcccagctacttgggaggctgaagcatgagaattgcttgaacctgggaggtggaggttgcagtgagctgagatcatgccactgcactccagcccgggcaacacagcgagactctttgtctcaaaaaaaaaaaaagagtgggcggtcaaggaaggcctcactaaggaggtgatctgayaaaggagcaagctagagaaaagcacagttcccagccagagggaacaggaagtgcaaagtggctgcagggtggtgaggggacacccaggagctgaggcaggaggaggaagaggctggggagggcatgctggctctttggattttgttctaagaacaggggaaaccattagagggtcttcacctggaggctggcatagcttggtttacctgtaagaagagaccccccggctgccctggggagactgggatgtgcagaggggaggcagggagacgagcaaggaggctgctgtgcttcccagggaggtaccaggtagctcagaccagtgggaagtggagttaggcaagaagcaggaggcctcccaaggggcrgtgatcagccaggctgcttttccttcaggttcctttagcaaatttgtgaatgtgatatcagccaggacggccattggccacgaccggaaagggcagctggtgctctttcatgcagacggccaaacggagcagcgtgggtgagtcctgggagctgaggccccccggccggggctcagtcctgctaggaggaacgttgacccaatgacagccaccctctgactctacctgctttctgggatgttgacacctatctgtcccccctcccagggccccctcaccttcccacaggatgagggttctgagatctttgccgattccaagaactcatcatcttcagctttaggcctcacctttcctgaaccctagataggatacaaggaaatggtcacaaagtgagcaggragaagatcttggttccaatcccagcttagccatcratgacttgtctacccacctatgccgtagacaagtccctcggcctccctgagcctcatttctagcccctgtaaagagagtgttttggtttgctctggttgcataaccagcacaaatttagcaacactcagcagggaatgttcttttgtttgtttgtttctttgagacagggtcttactccgtcgcccaggccagagtgcagtggtgcaatctcagctcactgcaacctctacctctcaggttcaggtgatcctcccaccttagcctcccaggtaactgggattacgggcacccgccaccacacccagctaatttttgtatttttagtagagatggggtttcatcatgttggccaggctggtctcgaactcctgacctcaggtgatccatctacctcggccttccaaagtgctggaattaacaggygtgagtcaccgcacctggctaatttttgtatttttagtagacacagggtttcatcatgttggccaggctggtcaacttggaatgttctatgttcagggtgtcccatggacaaaaccaagatgctggttaggcagggctcttctcttatctggaaagaatcctcttgtttaggttgttggaagaatccccgtcgccycctcagttgtgactgaggtcttggtttccctgctggccgccatctgggrcctcagctccttcaagctgcccaggttccttcccatgtgtgtcctctcccccagttgtccggccaccctctcatccccctcgtatttcaaatctcacttcctattctgtcaccagccagagaaggctctctgtgttgaacactcctgtgattccagtggctgcacccagatcctccgggccgtttcccctcccttaaggattcctatgcyatgtaacagcacaggcatgggtgtgatctcacgtgttcacagcttccgggggctaggatgagacatgcttgggggcgggggccacttagaaatgtgcctgcactgtgggcgtgatgctctgcactgtggaaggaaaaggagttaaatgagaaatgatggtgggcgctgagcctgagcagcgccgctttgtgccgcagcatcaacctgtgggaaatggcggagttcctgctgaaacaggacgtggtcaacgccatcaacctggatgggggtggctctgccacctttgtgctcaacgggaccttggccagttacccgtcagatcactggtaagcacgtgagagccgccttcrtgagrgctgaagtccrggtctgccccagcctgtctcattcagccaatattgagtgcctgctatgtgccaggccccgggggttcaagagagcagaaattgctgcagtccctcccccaggatgccagtactacccaggcctaggagcagggtcagttggtcagcaaagacctccctgaggatgacagaataagaactgagatctgaaggaggtggtagctgggtgggggtgggagagccttccgggcagagggcaccacatgtgaaaggcccaggrctgggagggattgtagggagcggaggaacctataaaagactggagagggctgggcacaggggctcacgcctrgaatcccagtgctttgggaggccgaggtgggaggttcgcttgggcccaggagtttaagaccagtgtgggcaacatagaccctgtctttatgaaaaaataaaaaaaaattaggcaggcgtgatggtgcacaccttacggttacagctgctcaggaggctcgggtggaaggatcgcaatacctcatctcaaaaatagatagacgccatcttgtaggtaggtaggtagacaggtgagaatggagagaggggtggttgggggcagcctggagggagttgaggggccgtctggggrtgtcstctcctcacacatcacatccctctacagccaggacaacatgtggcgctgtccccgccaagtgtccaccgtggtgtgtgtgcacgaaccccgctgccagccgcctgactgccacggccacgggacctgcgtggacgggcactgccaatgcaccgggcacttctggcggggtcccggctgtgatgagctggactgtggcccctctaactgcagccagcacggactgtgcacggagagtgagtgggggttctggggagggggctctgcccagccctgccttgccctaggccctcacctggcctccccggtcttgtctcggyagccggctgccgctgtgatgccggatggaccgggtccaactgcagtgaaggtaggarctgccacgccactagcggatggggagacggtggcccccggcagccmccactgctcctctgctgcttctgtctccaccttctggtctgggaaatgcttgcctcttgtcttctgccccggcctcacctgcacatcactgtgtgactcccctgtggctgctgcggcccgttccacaaagggctcggctaaaacaagggtccccgggctctggctccagggcccacctcaaatccagcacggtcttatcttgagatcctaactgcagtgcctctgtagagattctgcttccaaataaggtcacgttcaggggctagtccagggagggcagggggtgcttcacctttagcccggctctgtacacatgggcaggggcaggtatcctgtcctgtygagaaaggctctgacactggaggccccaacctttctcctccctcctccctcctcccatctcctttccatagagtgtccccttggctggcatgggccgggctgccagaggccttgtaagtgtgagcaccattgtccctgtgaccccaagactggcaactgcagcgtctccagaggtacctatccctccaaggggaggggtatgggcagacgctcctgctccggccccttcagcctgtctctggtatgttacagtaaagcagtgtctccagccacctgaagccaccctgagggcgggagaactctcctttttcaccaggtaggtgcttctgtgggagctggggccagggcgggaggaatcccccttctctcccgcacccttcccctgtgaggtccatctctgcccttgtcccctgccagctccctgccttagaggaagcgggaccagctctccccactgtctgctttggggaccctggagcagagcccagggccttcgagtgcccagcctctgttgtcagcatcccccactggagctcagaatgcaaactgggctagatgagatcccagggtgggggcaggaggtttcctcattctgtcacccaggcagaagtgctgtagtacagtcagctcactgcgatcctcccgcctcagcctcccaagtagctaggacgacaggcacgtgcccccatgcccggctaattttatttcttactgttttttagagataggatctcactattttgcacagacgaggtgcacagtcctgggctcaagtgatcctcccaccttggcctcccagcccccatgcccagcatccagctgtgttttatttggcttacataatttttaaaaagttaaaatatatcagcagcatctaaaaatcagtaacattcacatttttttaaacttttttttttgagacggggtctcactctgttgcctaggctggagtgcagtggtgcgatctcagctcaccacaacctccgcctcctgggttcaggcaattctcctgcctcagtctcctgagtagctgggattacaggtgcccggctaattttcatatttttagtagagacaggatttcgccatgttggccaggctggtcttgaactcctgacctcaagtgatacgcccgcctaagcctcacaaagtgctgggattgcaggcatgagcaccacgcccagccttaaaaacctttttaatggcttctcttaaaatatcaggccaggcgtggtggctcacgcctgtaatcctagcactttgggaggccgaggcaggtggatcacttgaggtcaggagttcaagaccagcctggccaacatggtgaaacctggtctctactgaaaatacgaaaattagccaggcgtggtgattcgagcctgtagtcccagctactcgggagtccaaggcaggggaatcgtttgaagccaggaggcggagattgcagtgagctgagatcatgccactgcactccagcctggatgacagggcgagactctgtctcaaaaaaaaaaaaaaaaaatcaggagatggggcagcacggacctgcattgtacgtcatgactgcctctgctgttccctgcacatgtcttaaatgttgccccatccccacctagtccattttgctcataacattccctgtgtggtccctggaggcacctgatttagtgctatctatgccgggtagagggaagcccctccagtgctacccaagccctgagcccacccagcagtcccccacttggggcttctctcctgtctgcaggaccgcctggctagccctcaccctggcgctggccttcctcctgctgatcagcactgcagcaaacctgtccttgctcctgtccagagcagagaggaaccggcgcctgcatggggactatgcataccacccgctgcaggagatgaayggggagcctctggccgcagagaaggagcagccagggggcgcccacaaccccttcaaggactgaagcctcaagctgcccggggtggcacgtcgcgaaagcttgtttccccacggtctggcttctgcaggggaaatttcaaggccactggcgtggaccatctgggtgtcctcagcccctgtggggcagccaagttcctgatagsacttgtgcctcagcccctcacctggccacctgccagggcacctgcaaccctagcaataccatgctcgctggagaggctcagctgcctgcttytsgcctgcctgtgtctgctgcygagaagcccgtgcccccgggagggctgccgcactgccaaagagtctccctcctcctggggaaggggctgccarcgaaccagactcagtgaccacgtcatgacagaacagcacatcctggccagcacccctggctggagtgggttaaagggacgagtctgccttcctggctgtgacacgggaccccttttctacagacctcatcactggatttgccaactagaattcgatttcctgtcataggaagctccttggaagaagggatggggggatgaratcatgtttacagacctgttttgtcatcctgctgccaagaagttttttaatcacttgaataaattgatataataaaaggagccaccaggtggtgtgtggattctgaatcatggacttaggtcactgctagggcttagcaggtgtggcttatcctgaaacagaagtcacaacggcatcctggagccaagtcctgttccctgcttgtttaatccagtgcttatcaaactttaatatgccacaggtcacgaggagatcttgttaaaatgcagatttgggcctggggtgaggccagcaattctgcgtttccaacaagctctctgacgatgctgatgcttcaggtccccagaccacacttcttgtctttcttagaaacagggtctcgctctgttgccctggctggagtgcaatggcacgatctcggctcactgcaattttgacctcctgggctcaagtgattctcccacctcagtctctcaagtagctgggactataggcacatgccaccatgcccagctaatttttaaaattttttttgcagagaaggggtgtcactgagttgcccaggctggtctcaagctcctggcctcaagtcaacctcctgccatggcctcccaaagtgctgagattacaggttcgagccactgcgcctggcccctgaccataatttgaatgaccagggcttagtttttcctcacagtatttttatagaatttaaattagttacccatgtttaaaagtcaagagattttaaaataaataagggcgggggtgcagtggctcacgcctgtaatcccagcactttgggaggctgaggtgggcggatcacctgaggtcaggagttcgagactagcctggccaacatggcaaaaccccgtctctactaaaaatacaaaacaggcatggtggtgggagcctgtaatccagttactcaggaggctgaggcaggagaatcgcttgaacccggaaggtggaggttgcagtgaactgagatcgcaccgctgcactccagcctgggcaacagagcaagactccatctcaaaaagtccagagattgacaaaaattccagcttgctggtttctctttaaagatctggcagccctggtgggcgcctgcacaagtcaccaggccagctcagattcagggagaagggaaacgggctctgcctcttaaaaaggagctgcaaagtcaggcgccttagagtcattcaggtgtattcctaagagcagttcccaagcctggctgcagatcctggaatctacagggatcactctcagtctgacgccacggccacgatgatggccatgatgaccatcctgaaatgacccttggcctgagaaccatgacctctgaggggacatctctgttgtgctggcggctaagttggaaaagtgacagtcctgtgcactggaatccaggcccagaggcagcagtacctgaagagggcctgtcacagcaaagttagaggggtcccaggtcaggtgactcaaacatgccaagcggtgtgagtcctgtggcccctggaatttttttttttttttttttttgagacagtctcattttgttccccaggctggagtgcaatggtgcaacctcggctcactgcaacctctgcctcccgggttcaagcgtttctcatgcctcaacctcccaagtagctgggatttcaggcatgcaccaccatgcctggctaatttttgtatttttagtagaggcggggtttcactatgttggccaggctggtctcgaacccttggcctaaagtgatccacccgcctgggcctcccaaagtgctgggattacaggtatgagctgccgcacccagcctgtaatttctttttaatttgtcattgtgttattgattttctttgcctgcccgacatccagtctctcttctagcaacagccctgtcttaggctaggattccccagatgcagaaactaagacaaggaggtgagagcaagtactttattggggaggcggccccaggaagcactggtagaggacagggagggaaggcagcctgtgcagagtgcaggagtgagcaagtctatactgtaggcaacaggggctcaatcctgctgggggcctctgggacagttggtagaacaggtcttggttgcaccacacaagggcgaggaagctggggtatttatcagccaacacccattcatcattggttgagggccgctcctgggggttgactccctggcagtgccagtctgccctacccagagaccgaatgtgccctggcaaccacagggagctgtgggaaagttgcaacatcttgtgacctgaagccttccatggtaatgagagtgcccggggaggtggccacttctgcctcctgctccacgtcctatctaaggtctgccgtccaaaatctaaatgcctgagccccaaaatgtgcctctcctgtaacagtacaagtgtcacacgttttgggttgccggagaccccaaaacccaggagccctggctgtgagcctctagcgtgttgctatcagggtagtacctctcccccattctccatccaggtggtttgggtggcactgtcttctcaccccaagttgcaggtgggcctgagagattggtccagagttaggcacctgccccgggtcagcccgtcagagcccatcgtggaacttctgctgcagctggaagaagaaactctctctgctgggactgtctaacttccaaggttagacacaaggagggccacaaggtgggccaaggtgggccacaaggaggaggaacggaaaccaactcttctccagtgtggagaagacctgatcagaaccaagagatggagcgggtgagccagtgtggaaaacgactagactgagggtgttggggtgggggtggggggacatgatttgaatgcctggatccagctatacctgaagccagccagatcattcttggacttccgaattacatgaacccataaattcccattttttgcttgaggcaatttgtattgggttttggggtctccggcaacccaaacgtgtgacacttgtattgttacaggagaggcacattttgggactcaggcatttagattttggacggcagaccttagataggacatggagcaggaggcagaagtgtctgagattccagtaccaacctatggtgctggtggggacacaaatatacaagagctaaagtcatcaaactgcaggcaagccggctggggattcatgtgctccgatcccagcagcataagggtcccctcccccacccacagtagtgactcaagacccccaggcacaggcacggtggtcttggactgcacactgaagtctctgcagctcaactgggaaccctgagagttccacatgctgggccatcgccatggtgacacgtctcagcttctggggtgctctgcacagaactttagtattcggaaagaccccagaaaggttcccatcctggcgtcaatgggtgggctttcaaggactctttggggccccaaaacaaatgaaattcgtgtgtgtgtcctgagttctcatgggattctccaagcagtctgtgtccggaaaaaaaaaaaaatcctggcttagaggtttcaaattgtgctttttgccagcttgggcaacatggccccgccgctacaaaaaaatacaagaattaggcatggtggcgcacacctgtggttccagctacttggggctgaggtgggagggtcgcttgagcccggcaggttgaggctacagtgaaccatgatcatgccaccgcactccagcctgggtgacagagtgagaccctgtctcaaaaaaaaatgtgacttttggggatccgcattcctccaaaatgccttgttgggggctgggcactaagggaggcagggaagtgagagggagaagttggtagccacagcctctgacatccctggaggccctgggctcccttcctcccaggccctaccccagctcccactgcagctgcttgcgtccaacctggctccgcagaggtcccaggggtctgtgccccaagaactgatcccagaggcagcctctgggccacagggagccctgggcatgttttgctcgctctgggtccaggccccaggaggcctccaaggaaagcgctgtggctgagacaggcatcagcagggccccacagctcaggcctgatcccagctcccgcccaccctccggagctccatcttcccccacagggctgttctttctcgatacccgccgcacccacgagtcagctggctgttcctttgaaacccgccacccacagttccagagaaatccacggaagagtcaccgcccatgaacacacgcaagtgcaagccgcctcctctcccctgacgagctgtgctgggcagggctggggagcagaagctgggtggacagatggccctcgtgccatcacacaaaacaccacacctgctctgctctcacaaatgacaaccccagccaccagctccaaaacgacgaaggcttttcagagtcccaggatctgtgtggcagccagctccactctccgtgccccaagagagctcacgggaaggacaggtggcaccctggacagggttcatcacaaccttctgacgtcaggactgtggctgttttgggatgcagctctccaggacaccaggtctggcactttggtaaaaccccagggggagggcagggcagcccaggagagatgggcaccagggattttcatatctgtttaatgcagatataactgtgtatctggttagctattgtatgcatacataataagttgagtagcatgccccaaaattcatgtccatccggaaccttaaaatgtgacctcgcttggaagtaagatctttgcaggtggaattagttaaggatctcaagacgttatactggacttaggatgggtcctaaatccaatgactggcatccctacaagaagaggagacacagagagagaggaaggccatatgatgatggaggcagagactggagtgatgcaaccacaagccacgaggtgccactagacactggaagaggcaaggaagggtcctcccctacagccttcagaaggagcagggccctacctccatggtgattccggacttccagcctccagaacattcctgttgttgttgttgctgttgttgttgttttgagacggagtctcactctgtcacccaggctggagtgcagtgacataatcttggctcactgcaagctccgcctcccgggttcacggcattctcctgcctcagcctcccgagtagctaggactacaggcgcccgccaccatgcccggctaattttttgtattttttagtagagacggggtttcaccatgttagccagatggtctcaatctcctgaccttgtgatccacccgcctcggcctcccaaagtgctgggattacaggcgtgagccactgcgcctggcctatttctgctttatatataaaaattgtgatcctccctcacacggcccaataaccaatcttgagaaccttaactaattacacctgcaaaaaccttatttccaaatgaggtcacattctaaggttctaggtggacatgaatttggggacatgctatccaatccattacatatgtatacaatatatatgatacacaattatacctgcattaaacagatatgcagccccttgggggtgatatcactccggttgcaaatgctctaaagcaagggtgtccaatcttttggcttccctggaccacattggaacaagaagaattgtcttgggccacacataaaatacactaatgatagctgatgagctgaaaaaacaaagaaaacacacacacaaaaaacctcagtattttaagaaagtttacgaactcgtgttggagcacattcaaagcagtccggggccgcgtgcagcctgcaggccacaggctgaacaagctagctctaaagtcttttaaacaacagctggaaagttcttgaacgagcccacgggaaacctccagggttttaggaagctgacgatgcaagtttatccaaatggaaaacatttaatgctgctggttggagcaagtgatcaggcaaacaaaaaaacccatcgtgtttcactggctcaaagagactttgttgaaaacaattatactattctcattggacaata

SEQ ID NO: 94216 - DNA, 62267 bp, Homo sapiens
  misc_feature (1)...(62267): n = A,T,C or G
nnnnnnnnnnnnnnnnnnnnnnnnnnnnnnnnnnnnnnnnnnnnnnnnnnnnnnnnnnnnnnnnnnnnnnnnnnnnnnnnnnnnnnnnnnnnnnnnnnnnnnnnnnnnnnnnnnnnnnnnnnnnnnnnnnnnnnnnnnnnnnnnnnnnnnnnnnnnnnnnnnnnnnnnnnnnnnnnnnnnnnnnnnnnnnnnnnnnnnnnnnnnnnnnnnnnnnnnnnnnnnnnnnnnnnnnnnnnnnnnnnnnnnnnnnnnnnnnnnnnnnnnnnnnnnnnnnnnnnnnnnnnnnnnnnnnnnnnnnnnnnnnnnnnnnnnnnnnnnnnnnnnnnnnnnnnnnnnnnnnnnnnnnnnnnnnnnnnnnnnnnnnnnnnnnnnnnnnnnnnnnnnnnnnnnnnnnnnnnnnnnnnnnnnnnnnnnnnnnnnnnnnnnnnnnnnnnnnnnnnnnnnnnnnnnnnnnnnnnnnnnnnnnnnnnnnnnnnnnnnnnnnnnnnnnnnnnnnnnnnnnnnnnnnnnnnnnnnnnnnnnnnnnnnnnnnnnnnnnnnnnnnnnnnnnnnnnnnnnnnnnnnnnnnnnnnnnnnnnnnnnnnnnnnnnnnnnnnnnnnnnnnnnnnnnnnnnnnnnnnnnnnnnnnnnnnnnnnnnnnnnnnnnnnnnnnnnnnnnnnnnnnnnnnnnnnnnnnnnnnnnnnnnnnnnnnnnnnnnnnnnnnnnnnnnnnnnnnnnnnnnnnnnnnnnnnnnnnnnnnnnnnnnnnnnnnnnnnnnnnnnnnnnnnnnnnnnnnnnnnnnnnnnnnnnnnnnnnnnnnnnnnnnnnnnnnnnnnnnnnnnnnnnnnnnnnnnnnnnnnnnnnnnnnnnnnnnnnnnnnnnnnnnnnnnnnnnnnnnnnnnnnnnnnnnnnnnnnnnnnnnnnnnnnnnnnnnnnnnnnnnnnnnnnnnnnnnnnnnnnnnnnnnnnnnnnnnnnnnnnnnnnnnnnnnnnnnnnnnnnnnnnnnnnnnnnnnnnnnnnnnnnnnnnnnnnnnnnnnnnnnnnnnnnnnnnnnnnnnnnnnnnnnnnnnnnnnnnnnnnnnnnnnnnnnnnnnnnnnnnnnnnnnnnnnnnnnnnnnnnnnnnnnnnnnnnnnnnnnnnnnnnnnnnnnnnnnnnnnnnnnnnnnnnnnnnnnnnnnnnnnnnnnnnnnnnnnnnnnnnnnnnnnnnnnnnnnnnnnnnnnnnnnnnnnnnnnnnnnnnnnnnnnnnnnnnnnnnnnnnnnnnnnnnnnnnnnnnnnnnnnnnnnnnnnnnnnnnnnnnnnnnnnnnnnnnnnnnnnnnnnnnnnnnnnnnnnnnnnnnnnnnnnnnnnnnnnnnnnnnnnnnnnnnnnnnnnnnnnnnnnnnnnnnnnnnnnnnnnnnnnnnnnnnnnnnnnnnnnnnnnnnnnnnnnnnnnnnnnnnnnnnnnnnnnnnnnnnnnnnnnnnnnnnnnnnnnnnnnnnnnnnnnnnnnnnnnnnnnnnnnnnnnnnnnnnnnnnnnnnnnnnnnnnnnnnnnnnnnnnnnnnnnnnnnnnnnnnnnnnnnnnnnnnnnnnnnnnnnnnnnnnnnnnnnnnnnnnnnnnnnnnnnnnnnnnnnnnnnnnnnnnnnnnnnnnnnnnnnnnnnnnnnnnnnnnnnnnnnnnnnnnnnnnnnnnnnnnnnnnnnnnnnnnnnnnnnnnnnnnnnnnnnnnnnnnnnnnnnnnnnnnnnnnnnnnnnnnnnnnnnnnnnnnnnnnnnnnnnnnnnnnnnnnnnnnnnnggagcgtctctgcccggccgccatcctgtctaggaagtgaggagcgtctctgcctggccgcccatcgtctgggatgaagtgaggagcgtctctgcccagccgcccatcatctgagatgtggggagcaccactgccccaccaccctgtctgggaggtgaggagcgcctctgcccggccgccctgtctgagaagtgaggagaccctccgcccggcagccgccccgtctgagaagtgaggagcccctccatctgagaagtgaggagcccctccgcccggcagccgccccttctgagaagtgaggagcccctccgcccggcagccgccccgtctgggaagtgaggagcgtctccgcccggcagccaccctgtccgggagggaggtggggggcggtcagccccccgcccggccagccgccccgtccgggaggggaggggttcagccccccgcccggccagccgccccgtccgagagggaggtgggggggtcagccccccgcccggccagctgccccgtccgggaggtgaggggtgcctctgcctggccacccctactgggaagtgaggagcccctctgcctggccaccaccccatctgggaggtgtagccaacagctcattgagaacgggccatgatgacaatggtggttttgtggaatagaaaagggggaaaggtggggaaaagattgagaaatcggatggttgctgtgtctgtgtagaaagaggtagacatgggagacttttcattttgttctgtactaagaaaaattcttctgccttgggatcctgttgatctatgaccttacccccaaccctgtgctctctgaaacatgtgctgtgtccactcagggttaaatggattaagggcggtgcaagatgtgctttgttaaacagatgcttgaaggcagcaggctccttaagagtcatcaccactccctaatctcaagtacccagggacacaaacactgcggatggccgcagggtcctctgcctaggaaaaccagagacctttgttgacttgtttatctgctgaccttccctccactattgtcctatgaccctgccaaatccccctctgcgagaaacacccaagaatgatcaattaaaaaaaaagaaaaaaaaaagaagagaagaatcaattagatgcaataaaaagtgataaaggggacatcaccacggattccacagaaatacaaactaccatcagagaatactataaacaactctaagcaaattaactagaaaatctagaaaaaatggataaattcctcgacacatacaccctcccaagactaaaccaggaagaagttgaatccctgaatagaccaataacaggctctgaaattgaggcaataattaacagcctaccaacccagaaaagttcaggaccagatggattcacagccgaattctaccagaggtacaaggaggagctggtaccattccttctgaaactattccaatcaatagaaaaagagggaatcctccctaactcattttatgaggccagcatcatcctgataccaaagcctggcagatacacacacaaaaaaaacaattttagaccaatatccctgatgaacatcgatgcaaaaatcctcaataaaatactggcaaaccgaatccagcagcacatcaaaaagcttatccaccaggatcaagtgggcatcatccctgggatgcaaagctggttcaacatacacaaatcaataaatgtaatccagcatataaacagaaccaaagacaaaaaccacatgattatctcaatagatgcagaaaaggcctttgacaaaattcaacaaccattcatgctaaaaactctcaataaattaggtattgatgggacgtatctcaaaataataagagctatttatgacaaacccacaaccaatatcatactgaatgggcaaaaactggaagcattccctttgaaaactggcacaagacagggatgccctctctcaccactcctattcaacatagtgttggaagttctggccagggcaatcaggcaggagaaagaaataaagggtatttaattaggaaaagaggaagtcaaattgtccctgtttccagatgacatgattgtatatttagaaaaccccattgtctcagcccaaaatctccttaaagctgataggcaacttcagcaaagtctcaggatacaaaatcaatgtgcaagaatcacaagcattcttatacaccaataacagacaaacagagagccaaatcaggagtgaactcccattcacaattgctacaaagagaataaaatacctaagaatccaacttacaagggatgtgaaggacctcttcaaggagaactacaaatcactgctcaacgaaataaaggaagacacaaacaaatggaagaacatcccatgctcatggataggaagaatgaatatcataaaaatggccatactcccaaggtaatttatagattcaatgtcatccccatcaaactaccaatgactttcttctcagaattggaaaaatctacgttaaagttcatatggaaccaaaaaagagcccgcattgccaagacaatcctaagccaaaagaacaaagctggaggcatcatgctacctgacttcaaactatactacaaggctacagtaaccaaaacagcatggtactggtaccaaaacagagatatagaccaatggaacagaacagagccctcagaaatgacaccacacatctacaaccatctgatctttgacaaacctgacaaaaacaagcaatggggaaaggattccctatttaataaatggtgctgggaaaactggctagccataggtagacagctgaagctggatcccttccttacaccttatacaaaaattaattcaaggtggattaaagacttaaatgttagacctaaaaccatcaaaaccctagaggaaaacctaggcaataccattcaggacataagcatgggcaaggacttcatgtctaaaacaccaaaagcaatggcaacaaaagccaaaatggacaaatgggatctaattaaactaaagagcttctgcacagcaaaagaaactaccatcagagtgaacaggcaacctacagaatgggaaaaaaattttgcaatctactcatctgacaaagggctaatatccagaatctacaaacaactcaaacaaatttacaagaaaaaaacaaacaaccccatcaaaaagtgggcgaaggatatgaacagacacttctcaaaagaagacgtttatgcagccaacagacacatgaaaaaatgctcatcatcactggccatcagagaaatgcaaatcaaaaccataatgatataccatctcacaccagttacaatggcaatcattaaaaagtcaggaaacaacaggtgctggagagggtgtggagaaatgggaacacttttatactgttggtgggactgtaaactagttcaacctttgtggaagacactgtggcaattcctcagggatctagaactagaaataccatttgacccagccatcccattactgggtatatacccaaaggattataaatcatgctgctataaagacacatgcacacgtatgtttattgcagcactattcacaatagcaaagacttggaaccaacccaaatgtccatcaatgatagactgaattaagaaaatgtggcacatatacaccatggaatactatgcagccataaaaaaggatgaattcatgtcctttgtagggacatggatgaagctggaaatcacccttctcagcaaactatcgcaaggacaaaaaaacaaacactrcatgttctcactcataggtgggaattgaacaatgagaacacttggacacaggaaggggaacatcacacaccaaggtctgtcatggggtgggggtaagggggagggatagcattaggagatataactaatgtaaatgacgagttaatgggtgcagcacaccaacatgacacatgtatacatatgtaacaaacctgcacgttgtgcacatgtatcctagaacttaaagtagaattaaaaaaaaaaaaagaaaattcactaattaggtgtgtgaccttgggtaaagttcaagagcaaagctacacaacttccctaagcctcagtttcttcatcattaattggggaagtgctctgaggctcaaatgaggtcatgcacataaagcactcggcatgggcagggcatctgagggaagcctgaacacttggcattgggcattgttattgttcttcctcaggctcctctcatgttgttctttctttacagcaaagttggcccgagatgaccaaattcacattctcaagcaacaccgacgtaaagaactggaaacacggcaaaaacaatatcggtgagttatgacatcagatcgagtggccacggggccrtggtttcttctatctcaagagcatggtatgaaataaaccctttccacagtgtatggcctgtcrctgctggaaagtcaccaaggcaccagctcccagtgtgggtgcacaatccccaaacttcaccttacctacaactccagacaagagatggagaggagagtaatgaaaataactttggatcaaccatattggcatgtaggaagaatgggcagaaaagcttgagtgtaccttaatgttctccattgtaggggttgcctcttacttcttatgtcttcttataacaattcaattataaaagtgatacatgatcagcaataaaattgacaactcttcagccaactgaccagaggattcaaaccattaaaatgagcaataagagaaaatcaatacagaaattaaaatgaataaaaaaggaaaaatgagactcataaaatgagggaaaatcaatacagaaattaaaattaataaaaaagaatactatgaacaattgcatgccaacaaactagttaaatgaaatgcgcaaattcctagaaagacgcaaactgccaaaactgactcatgaagaaatagttaatctgaataaaacaatcacaaccaaagagattgaattactaattctaaaatttcccacaaatagaagcccagacccagatagcttcactggctaattctatcaaacatttaaagaattaatactgatcttgcataaactcttttaagaaatagaaggaacacttcccaattcattgtctcatacccatattataccaaaactaaaggcatcacaagaaaactataaaccaatatcccttagcaatatagatataaacattttcaacgaaatactagcaaacctaacccagaagtatataaaaggcattaaacaatatgaacatgtgggatttagcccaggaatgcaaagttggtttaacatccaaaaatcaattaattgaattcaccatatcaatagagtaaataacaaaacaaaacaaagtacataatcatttcaatagacatacaaaaaaggcatttgacaaaatccaacacccattcatgataaaacactcaaaaaataggaattgaagaaaatgtcctcaacctgataaaggtttgaaaattcacaattaggctgggcgtggtggttcacacctgtaatcccagcactttgggaggccaaggcgggtggatcacgatgtcaagagattgagaccatcctggccaacatggtgaaaccccgtctatactaaaatacaaaaagtagctgtgtgtggtggcatgcgcctgtagtcccagctactcaggaggctgaggcaggagaatcacttgaacccagaaggcggaggttgcagtgagctgagatcatgccactgcactccagcatggtgacaagcaagactccgtccccccacatacacaaaaaaagaaaattcacagttaacattatacttaatgatgaaaggctgaatccagaaacaggataaagatgttcacttttgctacttctattcaacattgtactggagggtctagccagctcagttagggaataaaaagataagtaaaggcacccacaatggagtacagtaagtaaaactaccacaatttacaaataacatgatcttatatatagaaaatctgaaggcattcaccaaaagaaattattagaactaataaaccaccaagattgcaagatacaagataatcaattgtttttctatacattaacaaccaactatgtgaaataaaagtaagaaaaagttcaatttacaatagcatcaaaaacagtaaacatttatgaataaatttaacaaagtagtctgagacttgtacaatgaaactacaaaacattgtttaacattattaaagaagatctaaataggttgaaagacatttcatgttcatgaatcagaggacttaattttgttaaaatggcaataccccacaaattaatgtacmcgttcaacacaacccttatcaaaattctagstgatttctttgcagaaattgacaagctgtcaattctgcaaattcatatggaaatggaagggacccagaatagccaaaacaatcttgataaaaagaaaacaaagatggaggacttgcacttctcaatatcaaaattactacacagctatagtattcaagacaatgtgatatcggcataaggatagatatatagatcaatgaaatagacttgagagtccagaaataagcccttacacttatggccaattaatttttgacagaagcagcaagacagtttaacagagaaagaatagtcttttcaacaaatggtcctagcaaaactggatagccacatgcaaaagaatgaagttggatccttagctcacaccatatacataaattaacacaaaatgagtcaaatacctacctaaatgtaagagctaaaactataaaactcttttaagaaaacacaggagtaaaccttcatgactttggatttgacaaaggactcttgatatgacaccaaaagcatcagcaacaaaagaaaaatagataaagtgataaagtgatgtcatcaaatttacaaacctttatgtttcaaaggacaccatcaagaaagtgaaaagatgaaccacagaatggaagaaatatttacaaattgtatatctgataagggccttccatccataatttataaagaactcttacaactcaataaagacaaatagtccaattaaaaaatgaaaaaaatgagtgaggatctgaatagatatttctccaaggacccattagtcatctaggaaatgcaaatcaacaccacaatgagataccacttgatactaggatggctagaataaaaaaatccgacaagaacaagtgttgacaaggatgtggagaaatcagaaccctcatacactgctggtgggaatgtaaaatggcacagctgcttgggaaacagtctgctagctcctgactgttcaacagagagttacaatatgacagcatttccactcttaagcatattcccaacagaaatggaaacatatgcccacacaaaaacttgtacatgcatgattatagcagcatgacctgtaactatcaaaaagtgtacacaacccaaacgtccattaatggatgaatggataaaatatagtatatctatataatttgaccatgaaagaagaatgaaatactgacacttgttacaacatggatgaatctcaaaaacattatgctaagtgaaagaaaccagtcacaaaagatcatatattgtatgattccttttatatgaaatttctggaaaagaaaaatctgtacagatataaagtagattactggttgcctaggggcagggaatgaggaagtggtcatgggagtgacagctaaaggatacagtgttccttttgccggggatgaaaatgttctaaaactgatggttgtccattgtgtaaaaattaatactaaacatccttgaattgaacactttaaatggataaattttacagtatgtgcattatatttcaataacgctgctagataaatttaaaaattaattcaaaatggatgatagatctaaaagtaagggctaacaacataacactcttggaagaaaacatacaagtaagtcttcataatcttgggttcggcaaagtctcttagatatggcaccaagagcacaggcagcaaaagaaagtagacaagttagatgtcattaaaatgtaaaagatctatgcttcaaaggacatcatcaataaagtgaaaagacaatccacagaatggagaaaatatctaaatcatatgtctgataagggacttgtatccagaatatataaagaactctgacaactcaattttaaaatattctgtacaaaaaaccccgtttaaaaattagcaaaggatttaattaaatagttctccagagaaaatttgtgaatctccaataagcacgtgaaaatatgctcaacattattaatcatcaggaaatttcaaatcaaaaccacaagatacaattctaaccactaaaatggttagaataaaaaagacagatagtaacaagtgctgccaaggatgtggagaaactggaaccctgatgctgctaccggaatgtaagatgatgcagccacttcagaaaacagtttagtggttcctcaaaatctgaaacccagctacaatatgacccagcaattctactcctaggcctctacccaagaatattgaaaccacatgtctatacaaaacttgtacacacatatttatagcaccattgttcacaatagtcaaaaagtagaaacaacctaaattccattaactgaggaatgaataaacaaaatatagtttatccatacaatgggatattttttggcatcaaaaaggaatgaatgccaagcgcggaggctcacacctgtaatcctagcactttgggaggttgagacgggcagatcacttgaggtcaggagtttgagaccaacctggccaacatggtgaaaccccatgtctacaaaaatacaaaaattagccgggcatgttggtgcacgcctgtaatcccagctgcttgggaggctaaggcaggagaatcacttgaayccgggaggcggaggttgcagtgagcctagatcccgccactgcactccagcctgggtgacagagcaagactccatttcaaaaaaagaaaagaaaagaaaagaaatgaactacagatagatgccaaacactgaatgaacttcaaaaatatgctaaatggaaaactcacttacggaagaccccatattgtgtgattctatctgtatgaaatgtccagaataggcaaacccacagagtcagrttagtaggtgagtagttgcctagcactaggagttggggaggggraacaaggagtgaatgttaatgggttcgaggtgtcctctggggatgagattatttcagaattgggttataatgatggttacacatacaactctgcaaatatattaaaatcttttgatagcatatttttaaggggtgaatttaatggtatgtaaatgtatctcagtaaagctttttggaagataataacacattacagagtgctcctctggaaatgggtggctgatgggctgtatccagcctctacaagtgtttgatggatcattattgacttatgagtaaacagagatattcttcaggcttccccagtccacacttgtctgttgtctatatcaaggttttctttcatttcatttcctgctttggcccctggaaacatttgagtctgtgcctccttccaagggaagaaagtggaaggaatcattctacatggacagtgaagttacctgggctgtggaggggcctttgggagccaatattgtgatacttttctacatatccctcaatagttgaacttcttacaaggaatatgtagtatatctgggttgtttttttaactcaaaaaagtaaaagaaggaaaataatatagagccagaaaaatacctattttctgtatgaattatgaattttatgaactttttcataaaaattcatgtttaattgttttcactttgtcttattcactttttaaaatttgggattgtgctatatataccactttgcatcctccttgctgccctttagcagtgtagcaaaaatcattttcccatattttcaaaatctcatcataaacattattctagtttctatgtactattccattggatggatgcctcatcattcacttaaacacccagcttccctggacatttaggaggtttctaatttttgtattcttataagcaaagtgaaaacccttgtatgtgaaatttgtatacattattaagtattttcctaggacagatgcccagatatgaaattaccaaatagtaaaagttattagtatacattgacaaatttctcctcaaaaatctttaaccatttgggaggctgaggtgggtggatcaccaggtcaggagatcgagaccatcctggctaacacggtgaaaccccgtctctactaaaaaatacaaaaaattagccgggcgtggtggcgggcgcctgtagtcccagctgctcgggaggctgaggcaagagaatggcgtgaacctgggaggcggagcttgcagtgagccgagattgcaccactgcactccagcctgggcgacagagcgagactccgtctcaaaaaaaaaaaaaaaaaaaaaatctttaaccagttttcacgagccatgtatgggtccctgtttcatcaaacacttgccataactgagcaatatcttcatttttcttaatttttctaagttgcaacagcatccctcaaccctgtagctccttcttcccctatgcccagccacccactgctgtcaaggggtgagaaatcccacaccaagaacacaattgccccacctcaaaactgtcttagcttcatcccccttttcatcaaaaacattccttgaaacagaataaagaaacaacaaacagccacacgtatgtgggtactgggtctgctacrgagggctcggctgatgggtggcactgggccactggacatgcatctcgaggacaggggccagccagcacggagggctgaaggagaaggagaagaaatcagactccacctcttgccattcaggagactcagcttggggttgattagacttaaaagttaaaggcaaaactgtaagacatttagactacaggtgattattcttccaggtctcaagctaaaaggatttttcaaacaagactcagaacatattaaacacaaaggaaaagattggtaagtttgcctccctcaagrtaaggacactctgttcattgaaagacaccaggagagagtgaaggcaagtcatggagtgattgacgagaattattcctagtatgtgaaggacctacaaatctttaagaaggggagtgtcattcactagaaaatgggcaagaagtttgagtacttactgtacaaaatataagcagcaagtatacaaaaggtgttcaacttcattaggamtcggggaaatcagaagatcacagtgaactgctgctactaccacacatatgcccccagatgggcaacacttcaacaactgacaacacctgagtattaaagaagatccagagggctgggaacactcatataccaccggcaggaggacaagttggtaagacctccgtggaaaacaatttagcaatatgtcataaaactgaagctacattataatctatgacccagaaatcctatagtgggatccaaatttgtgtgcatgtgcgcctggatactcacaacagcattactcatgatggccaaaaaatggcaacaactcaatgtccaacaaacagtagaacagacaaattgtcaaggaaaattctacactgcaaggaaaatcaacaaactgctgctaacatggacaaacctcactgacgcagtgttgaaggaaagaagccaggagcgtgtctggccaattcataactttggaatgaaattgtttagggaggtgtgtcatagcggaaccttaaacaataacaagaaaatgattatcataaagccgaggatggtcattaccgggratggaaggagggttgattgggaaaggtgggggtgagggtacggacaatgttctgattttttacctggatggtgttcgtacaggtgttttgtacatttttctgcatgtgtgagtgtgtgtgtgcatatatacatatccatacatattttatatattctatttcccaattgaaaaatcaaaaataaaacttacatgccattagcatcaagtgtgggagagtaacctgctgtgctgtgggtcatgttaagggtttataaatgtgtgatttgttttagagtatttgtgcacaagcctctcagctcaggcaccatatgatgtgtttccagacttccatacctggtgcagtgcacacgttgtgcttgagctctgcctcccatcccaaagggctgttgtttctatgcttcttccttggcttccctccctgtttcagacacctatggcaaagcccctgcagccagttctcagagcacttctggcctgtgaatctgggttaagataaaatgcccataaaattcatttaatttgttataagccactaacactttagtatgaattagtggggctctaattagactttgctatctactcatctaagataacacaaactagcccaattatctgggagctacttaacattatcataatcttgcagcagggggcttctggtgagatcgtttccccctttcttagatttaatcatttttttcttcctccttccactcatctgtccttttcagaaaccctcctttgcttccgttcaggaaacactgaactttgcactgtctgcacaatcttggagttcctctttctcagaagatttctcaggcttccagatcagagtttggaagtaaagcaatgactaagaatagtccacactatgtcagaaagctggcgcttcttgcaggccctccttactcactcagccacgcagggagaaggagaagcagacccaggtcatagcccacagcttgtgctctcccactgtgaccacatctgtctgtgttacatgcacactcacacacagcagtaaatggcaaagtgtaggtgtttgttaatcgatataatttaatctaatcattatgtgacctgcacttttcactcatcactaagtattgaagaggatctggttgacacagatagatgtggttcatgcagttaacttcttcatggcatatcagtatctgaataacccatgcgctcgtccgctctcctgctgatgggcaggcgggctgtctttaatttctagctgttgcaaaccaagcgacagtgagctttctcacacatctctctgtgctctcatggaagagttactgtagggaatattccaagaagtagagttgcagggttgcagaccacgtgtttttaagctttctagatattgctgattgttttccaaaggcattctgccagtagacaccccagtaactgtttctgagattcactgtttccctgcatcatcaacacttcgcatcttcagatgttttcattcttgcgtgtgaaatagtatctcatatattttccccttcttaaactgctactatttcttgccttctgggaatgcaccataatttacttagccattcccctattcactgacgttcagttcatttcccatttgtagatgtgtttgtttgttttgggtattgcagtacaaacaatgctgccagaaccaaccttgtacaaacatcttgatgtactggtgctttaattaatggcagatccatttccagaactcagattgctggaacaaatcagcattttttcatcttaagaaataccgacaaaaatcctttcacaaaattgtatcgtaatttgcrgtcctaccagctgtgtatgaaaagatacttttgcccatccatacatttgtcagtacccgatgaccttgtttgacagtctaaaaatccctaagaccttgtggttgttttagtctgcactcccctgaccactaataagcatcactgcattgcctatttataagctttttttccctattgttctttcaattattaatctaaaggagctctttctatatcaggatagtatccgtttgttacatatgtatagcatttattatttgtcttctgttgcttttgccacaggagattttagttctttattttattaactatgtattgtttacatctataacttttgggtttcctcctttgcttaagaaraccctttccatcccagtgttacacaaatacttcccccgtaattttgtctaatacttttataatttcccctttgagtttagagctttcattcatctacctttttttttttttttgagacagagtcttgctctgtttcctaggctggagtgcagtggcatgatcatggttcactgctgcctcaaactaacccaggctcaatccatcttcccacgtcagcctcccaagtagctggggctacaggcgtgcgccaccatgccccactcctgccacgtgttttcatacatacctgggtggaactctcccggtagcattcgttcctgacttggatgacagggatgatgtctttcctcctgacttggatgacagggatgatgatacccacggtacaagctggcataggatggcagtcatgagctctggattcgagtgtctgggctcaactcacacttactggcactttctccagtcctgtgaaagttgtttaatctgtctgtgcctcacttccctcatctgtaaaatgagggaaataacagtgccttccttttaggggtttgagataataggttaaaccatgaaaacacagagaatagtagtaggcacatagaaagcactggataagtgttggcgagttttgtattatgtatacatagtctctgggtctgtttccgcactttatgtgttagcctatttttctactcgagaccccagcaccagcttttggttatcataactttctaataaatgttaatgtctgttacatatctcactgttctttcttaagtttttcataatgagaattactttgaacttcacataactgtgttatgtgttggcattttactgagattcagtctttccatccaggaacacagcgtgtctttccacctctctagatcctgtgtcaacgtacttccatagaatttctagttttcttcatgcaggtccttcacctttctagctactctacatttagcatttgctgttctgagtaggatatttttctgtttgcaaaaatattgctgggataaatgtaaattacttgtttcttacatttactgtgtgttggtcccttactgaattctttcattggttctaatcacttgtttttgtttgtttgttgttagtgagtctggttagttaatgtgctcatattatctaaatgttaataattttgtctcttactttccattatctacaccactgatattcttttcttattccatgtctggaattcccaaaacaagtagtggtagtagtgatgaacatccctctcatatttttgtttctttgtttactattatatttgctgtagttttataatgcatattctttgctgtatttaggagtttattgattcattctaatttaatttttgttcagctgaacttgttcaattaatttcctcagaaggtccatgtgtagtgtaagatctgagtctgtgcttgtcgtcctgtccccctacccatcccctcaaacaaattcccctgccctcattgatgacaatatgagaggcttagatgacgatctaaaaaaagtgtgtatacacttcagtcttcccattttcagaatgacagaggagaaatctaatgatagtttgtttcttttcctagagtttctatctccctccctcccccactttcttcctctctcgttcactctctgcatctctttccttctctctgtctctgtttctcctgtctcttggacattttaaaatgtattcagtatatacctaggtgtatctttttcctttttttttttcccccccacctaggacttgtcattgagaaaaatgaygagacaagtctcaatcattttaggaratttatttgcgaaagttaaggacgcatgcccgggagacagcactatgcctttctctgaaggtgattttgagggctccaaatttaaagggaaaagggcgggatattgagaagtacacaattttcatgtaagagcagggcagggaaaaatagttattcatgcctttctctggctcagtgaatctgcattttttttaacataagatgacataaacaaatgaggcagaggaaaaatgcagggagtctgcattttacataagagaacatagataaagtaaggcaggggaacaatcagatatgcatttgtatctggtgggtgactgcacttgtaaagataagctatcaatttgcattgccatggtgaaattttaacggttcactaggaatttccttgtgagcaaaatatggtggagacatgtagcttttcatcatagccatcttatttaggaaccaaaagggggaggcaggtttgcatgacacagttcccagcttgacatttccctttggctaaatgagtttggggtcctaaaatttaatttcctttcacagacttaagatattgaagtatttttcagcttaaaggagttcttcttttatttctttgatttttttcacttctccatatattactctctctccttttggagcttttactccttgcatattacatctgtatctggctttcatgtctgttaatgaaaagagtcacactctgtgaaatatttgaaaagacttattctgagccaaatatgagtgaccagtggcccatgatgcagccccaggagatcctgagaacatgcacccaaggtggttggggtacagcttgcttttgtgcattttagggagacataagacatcagtcaatacatgtaagatggacagtggtttggttttggaaaggtgggacaacttgggggaggggagcttccaggtcataggcagattcaaagagtttctgattggcaactgcttaaaagaattattatctaaaaacttggaatgtctaggttaagataaggggttgtggaaacaaagttttttatcatgcagatgaagcctccaggtagcaggcttcaggtagaatcaattgtaaatgtttcttatcartcttaaagagtctgttctaatgggcttaacatctctgtgttgatgtgaatgctgatcagttgtgcctgaattccaagaggaggagagtacaatgaggcacgtttagccacccattcctatcatggcctgaactaatttttcaggttaactttggaatgcccttggccaaggggagggtccatcagtcagttcaggggcttagaattttatttttggtttatgtctctcatagtttcatttatggcttccatttctttgtagtttcaccctgtatttgggttacatgttcttctattttgcacaaagcacttcctggcacatagtaggtgctccataattagttgtcgaatgaacaccttctctcttctaggtgttaatgagtttagcttaaacttttctccttacatattttaaattcagcctaaaagtttctctgtacatagtgaactgtaacctaactggatgtgtaaacagactgtcacctactctcatagcaagtaaccaagtctcagccaatcacagcggccagacttcagccactcacagtggccagctgttcaaactgggctcaagtaaggcaaatgctgagccatcaccaatctggctgtttctgtacctcacttccattttctgtacatcacgttcctttttctgcccataaatcctatccaactatgagacagcatcaaagtcactcggagcctgctctggtttaggggctgccctattcttgaattgttctttgctcaattaaactgctaaatttaatttgtctaaagcttttcttttaatacaagagaccaaacatctcacagtgattattctctttgtctgtttctctattgaagtcttcattcagaaatcatgtttgtggttacagaaagtctttttacactccaattatactaactgcatccccttaggatctctctgtctgtctgtctctctctctctctctctctctctgtctctctgtctctcttgctttctctctctctctttctctctctctctctctctgtctctctgtctctcttgctttctctctctctctttctctctctctctcattttttttccaataaattaaatgcctttctacttctttgttccttctgcctgggtgttccacttggtcttcctcaatggagtgggattccatctccaccagttaatgtctgtggccatgcaggccttcggctcctgtgcaggtcagcctgtcagggtctcttaagcagcagtgacctgcagtggaagggacataaacatttggtttcaggggggcagtagtgaactagcaagcaagctgtcctgtctccatgtgctgtgaggccatcatcttctaaccacacaagtggggcatttctgcccattggtgctgccaccctccatagaccagggcagggcatggggcaagaaggtctttttggtgctgaagaagtattccacatccgtccaagtggactattcacttaagaaaacattaatgccatttgctggcacagatgcccttgcatggctcattgtttacatactgaaaaacatctagctccactgagcttttaaaattaactagagcccttgaactgtccaggcaaagagaaaatcatcagtaatatttaaattgatatgactaatgatagctaattaattgatcattactaccagtgaggctactgaatggctcaattttagatatatattggagatgccttgagtcattttccaaaacaaacaaacaaaaaatgtgtagacttgtccacatttttatccttgttaatatactatcattggcattaatacaaacagcaaaaatggaaggttttcttaaaatctgaggacgtagaatattctaaataaaccaacagtgagaaatgtaaggtgccacataacagaaaacacttgacaaaatgcctttgctgtcagaaggatcatacccggtccctgttcacttcttgtgatcctaaggagaggctactgggccaagaggacactgtgacagttgggatttggggaaagtcaaagcacaagatcatattaaaataactcaggacttttttaagacccaaaatctcgatattttactttcctctcaaaagaaaattttaaaaggaaggagaattaggaatataaatgaaaaagctaaaaccctaaaatgtaaaatctggtttttaaacaaacacaaaatcattctccctccccaaagaaactaacaggatttcattttgtttttgttaccagaaaggggtcctgatccagaccccaagagagagttcttggacctccacaggaaagaattcagggtgaatccataaagtgaaagcaagtttattaggaaagtaaagcaataaagaaaggctactccataggcaaggcagtagcatgggctactcgactgagcatacttacagtcacttcgtgatcatgtgctaaacaatgagtggattattcatgagttttccaggagaggggtgggcaattccaggaactgaaggttcctcccttttttagaccatatagggtaacttcctgacattactatggcatttgtaaactrtcatggcactggtgggagtttcttttagcatgctaatgcattataattagcatataatgagtggtgaggatgaacagaggtcactttcatcaccatcttagttttgttgggttttggccggcttctttaccacaacccattttatcagcaaggtctttctgccctgtatcttgcatcaatgtcctgtctcatcctgtgacttagaatgcctaacctcctgggaatgctgcccagtaggtctcagccttattttacccagcccctattcaagatggagttgctgtggttcaaacacctctgacattttcacaatttaagtttactcaataagtaaacaaaaaagcaaaataaacatttttcaaaaacacaaatgcccaatgccacgggatacgtttcaaggatgtcaggatctgagcatgtttactggatgcagtccgtggcttgtctttggggaagctgttttgattgtaataatctctaaagctgctattggccagcaggtgagagagggaagccttttagccatctgtgcctgggtccctctcccaggccacctgctgccgtgtcgtcctattgtgaaggcagaagaactgtcccatttccccaaatgccacatgcaggacatgcacgcagtccagggcacacactgatcaagttggcagaatggtggatgtccaggttgggcgtggctgggcagccttaataccttctacctccagtgactggcaaggcaggcctctactgttcaatgtcacctctagtaagtgaggtctccctagactacctacagaactttttatgcagtggtgcacacctgtaccactataagcccagtctcagggttcccactctgatgctcagggcacagcaaagttggtgcsactggactttggaagaggtcccagaaccttactggacacagggtcagcctatgatgtgttgactttattttragtacatcartctccctgtgtaacatcgtctgacagtgtgggcggccctcagctgagggggcagaccaaaggctggcatttaactcaatttcttctcctttctcatgctcagatggatggagtggaaccctggcttccccttgagcatcgatgccaaatgccacaaggatttaccccgtgatatccagtttgatagtgaaaaaggagtggactttgttctgaattactccaaagcgtaagtttacgagaactgagggactctgggcagcccctccagtggctggtgctgggggtggaaccctcactcctttcctcatggggtccttgggttgggggaacagcctagctgagccaaacgctttgatgatatgttggccatagagtggattctcaacgcacaattgcaggacaaccggtatcttaaaaaaggcataaccagaggactccagacaccagacatacatgtgtttttggcccaaagcaggggtctttagttggaatgcctcctccccatccatatctcatgctctctatggccacttcaaaggtgtgaaggctttgtgtccaggctgtcaccaagatggcaggtgctatggtaagaatggccaaattgccagtgctgatcccaggacatatgtcccctgttcctccgtcacaaccccacgagggagccacagtcatcatccccattttacagttgaggaactgaggaatacggaggttgactaccttccttgcctaaggcccccagctaataaatggcagagatataggttctgtgcacctttgtttcatccgaatgtccgcagggctttttaaagcttgcccaggctatcgggagactctaggctgcttgttaaacatatggatcccccgaccctatcccaggactactgagtgtagggatctttaaatctgcacattgaccctatagggaattttaaaaatcatgtcagtttggcgaaactattccaatcaatagaaaaagagggaatcctccctaactcattatatgaggccagcatcatcccgataccaaagcctggcagacacacaacaaacaaagagaattttagaccaatatccctgatgaacatcaatgcgaaaatcctcaataaaatactggcaaaccgaatccagcagtacatcagaaagcttatccaccatgatcaagtgggcttcatccctgggatggaaggctggttcaacatacgcaaatcaataaatgtaatcyagcatataaacagaaccaatgacaaaaaacacatgattatctcaatagatgcagaaaaggcctttgacaaaattcaacaaccattcatgctgaaaactctcaataaattaggtattgatgggatgtatctcaaaataataagagctatttatgacagacccacagccaatatcatactgaaggagcaaaaactggaagcattccctttgaaaactggcacaagacagggatgccctctctcaccactcctattcaacatagtgttggaagttctggccagggcaatcaggcaggagaaggaaataaagggtattcaattaggaaaagaggaagtcaaattgtcyctgtttgtagatgacatgattttatatctagaaaaccccatcgtctcagcccaaaatctccttaagctgataaggaacttcagcaaagtctcaggatacaaaatcaatgtgcaaaaatcacaagcattcttatataccaataacagacagacagccaaatcatgagtgaactcccattcacaattgcttcaaagagaataaaatacctaggaatccaacttacaagggatgtgaaggacctcttcaaggagaactacaaaccactgctcaacaaaataaaagaggacacaaacaaatggaagaacattccatgctcatggataggaagaatcaatatcatgaaaatggccatactcccaaggtaatttatagatcaatgccatccccatcaaactaccaatgactttctgcacagaattgggaaaaactactttaaagttcatatggaaccaaaaaagagcccgcattgccaagacaatcctaagccaaaagaacagagctggaggcatcatgctacctgacttcaaaccatactacgaggctacagtaaccaaaacagcatggcactggtaccaaaacagacatatagaccaatggaacagaacagagccctcagaaataacaccacacatctacaaccatctgatctttgacaaacctgacaaaaacaagcaatggggaaaggattccctatttaataaatggtgctgggaaaactggctagccatatgtagaaagctgaagctggatcccttccttacaccttatacaaaaattaattcaagatggattaaatacttaaatgttagacctaaaaccataaaaaccctagaagaaaacctaggcaataccattcaggacataggcatgggcaaggacttcatgtctaaaacaccaaaagcaatggcaacaaaagccaaaatggacaaatgggatctaattaaactaaagagcttctgcacagcaaaagaaactaccatcagagtgaacaggcaacctacagaatgggaaaaaaattttgcaatctactcagctgacaaaaggctgatatccagaatctacaaacaactcaaacaaacttacaagaaaaaaacaaccccatcaaaaagtgggcaaaggatatgagcagacacttctcaaaagaagacattcatgcagccaatagacacatgaagaaatgctcatcatcactggccatcagagaaatgcaaatcaaaaccacaatgagataccatcttacaccagttagaatggcaatcattaaaaagtcaggaaacaacaggtgctggagaggatgtggagaagtaggaacacttttacactgttggtgggactgtaaactagttcaaccattgtggaagacagtgtgacgattcctcaaggatctagaactagaaataccatttgacccagccatcccattatcgggtatatacccaaaggattataaatcatgctgctataaagacacatgcacacgtatgtttattgtggcactattcacaatagcaaagacttggaaccaacccaaatgtccatcaccgatagactggattaagaaaatgtggcacatatgcactatggaatactatgcagccataaaaaaggatgagttaatgtcctttgcagggacatggatgaagctggaaaccattattctcagcaaactatcgcaaggacaaaaaaccaaacaccgcatgttctcactcataggtgggaattgaacaatgagaacacttggacacaggaaggggaacatcacacaccagggcctgtcatggggtggggagaggggggagggatagcattaggagatatacctaattaggagttaatgggtgcagcacaccaacatggcacatgtatacatatgtaacaatcctgcacgttgtgcacatgtatcctagaatttaaagtataataataaaaaaaaagacatacacggaaaaaaggaacacaaatccacaggaacagttggtggactgtgcctttttccgaagatgtctttaagggcatcaatatttaaaggagaacaggctggaaggaagaaagggagggcatggtcacgttactgaatccacatgttgcaaaagaaaaggagcaggtaggggaatagtcagttatgtattcctcttgcgcttagtacatcagcacttgataaggtgaacaccaagagctacctgtggaggttttcaccttttatctgtagctatcttcgtttcttgcatcactcagctttcagcttaatttttcccttttggcagagtgaattggggtccaaagattttcatttccttttacacctagaatcctctgaggagcattagcacctgctagtgccaggccaaccccacacccacagatgacagtctatgagggtgggaccctggctttgagtctgcacacccagcaggtagacgaggctgagaacccagccagacttcaaagcttaaaataatattatttatttctaaacattgtgtcggtgttttggggggtacaataatctattttaagcttcatggccatcctgggaggtaaataatattattgaccatttctaggtgaggaaactgagtctccaaggggtcaaggtcaaggagtttgcctaaagtcatttaggcagaaattggcaaaaccaggatttgaatccaggtctgtttgtgtccaaagctggggcatttttctcctaccacaattggggtctactggagagaaaaattaaaacctaacatctggattagtaatgcagcagtatccaccatctccctggaaacatcacggcagttaggggctcacttcccttcccctactctgggattgggattgttgatcaaagccatgtagctttagtgggataggtcccagaccaggatgggacaggcaggacagaaggcccttgtgaaagagacagtttggagggaataataaggatggtgaggtagtgaggtggagagtactgccacccagtttggagggaatggaggaatactggacagatggacaatcaaaccgatggacaggcagatggatgggttgagggatggatgatgaatggatggatgaagggaaggaggaaggatggaagaagaggtggatgggggatggatggagagatagatgagaaattgatatacggatggatggattcatggatggtggatggatggatggatgacagatagtgagatggatggatggatagatgggtggatggattgatgggtggatggtgaatggatggtggatggatggaagtatagacagagagatggatggatagatggatggatggatggatggaggaattaatggtggagtgaaggccagactgtgcctttcttatctctgttcagtgtttctgaaggtcattgtcatctctgtatctcaggagcctctgtatcttagcagctgtcacagaataggtgctcattaaatcctattaaaatgaaagtgtgacccacctggcccctgagtgcccctgagtgccagctgggtcacagtccattttaacagggtttaatgagcacctatcctgtggtatagaaggtaactgtgcacctccttttcatgtatccccatcatggctaacaacagcctagacatatggttctcaatcctgtgtgtttagtgttacagactccatgctgcccactctgcacaaactgtggaaccaggggaagtccagcacagttatattttagggctactggtggattccagtgtatagccaggattaagaacactggcctgtaatgcctttctgggcctccccaccccccacatatggttgcatctatttgctgagtcaagtccatctgctgggtcccagggagtgcctcctcctctcccagctccaccatctctcctgagtgagggcaggagcatctttccagctgcctccctgggctccatctctcaagacagtgggagggcttattctcaagtgcttgtataatttgttggaggctcgctctaaaaagtaaatataatttcttggttggctcaattgcaggtgagagcccagatgtctctgcccagaaatggagatacatccatagggacgcacccgcccctgccatctctcaggtcctacatgcataggatgctccaccgtggggagccagcagggctttgcagagcatctcttgtctctgacctagctgtttcctttgccacacccaccctccccacttcttggccaagacatgggtgaggggccccttcttgcagaagcttctagaagcctctggccccagtgaggtcccctcccctgtactccccagtgccgcccaccctgcccttggccccagaagtgctgcagcccacgtttctccacatcgtcctgtcattagccccttgagtgatggcctattggcaggagcagagcgaaggaatcctgagaggggcccttctgcccctcctggcccagcaggctggacagtaagcttagccccactctgagcaccgcctctgtgctggcacagtggatggagacccttgagttctgcgggggagagaagaggtgtccctgtatttgaggagctgagccaagggggctggaccacaaggaagcagcttagaggagcctgtgtggggatgaggggtgcctgggagagggccctgggccggtgggggttggggggaccctaggaaagtcgtctaagttccctgagcctcggtgtcctcaaatgaacaatgagacccggccccagctcctccccagggttgtgagattaaaatgggatcgcacacatcagcccctcagggaagtttctccctaaagacagcctttgtcttctccattcttggttcaggccctctgggaccgcgtctccaccatcacacaccggcctagggctgcactcttggaagggcccctgcgcttgcagggtgggcaggggaccctcgcttcacctgggcgtcctctctgatggggcccaggaaggctttgcagccgggggccatctgaccaggtcttactgggcccaggcagaggtacgtggggcctggagaatggcacagggggctgcagcggagagagactgtgggcacaggtgtggcgaggccaggccgccgagagccaagtggtttgcgaaatttcctggtggtgtggagggaggaaaagctgatgtgttcacctccccactcgctgtttgcagcctggaagacgattgcagggggtggcagggctgaaaagacaatgtcctcattaaaggaaattgagaaagagagtttccttcccagtggggcgggacagtgcagaaatgcggccggtcctggaagaggtgggggcgaggggtcgggggctcacacgccctgcgatttcctcccatgagaatgggcgggggcagctccgggaagggtggcggatggagccgccctctccccaggaccacaggggcgctttccagtgaaggcgscgtaggaaacgccagtctgtgccgcagtgtacgtagaggcgctatgagcccgagtttcccacgtccagggacaaactgggagccgtgactgtcaggccgcgcggaggctgccctggccgcctttgcggtcaggtgaaggcgcagaggcagggaggccgggcgagcgcaggcgggcggagagcagaccacgcggaagaggccgagagagaaagcggggcacccggccgggggggtcatttacaagggacgctgggcacgaaggaggctggggcgaagatgagtccaggggttgggttgagagcgctgcgcagccgggctgagaagagaagctgacgagtgactcccgacaagggacgggggagagggaacctgggggcaggcagaggcctagggggtgggctctgagggcagccactcccaccggccctcccccagccccgcaggccagccacatgccccgtgctccagacgacccagctacatggatggcagcgtcctgaagggggatgatcggtagggagtgggtgcggaggctcacgcctgtaatcccagtgttcggggattcccgagcgggaggatcgcttgagccggggaggtggaagctgcagtgatctgcgccactgaactcccgcctgggcggcagagtgagaccctgtttcaaaaggcaccaggggtgtagggaaggagcgatatcccccaggcaaggaaggctgcggaggggccaggccaggagagaagggccctgagctcagtggacgggcagggtgcctgtggagraagggagggacgtagcagcaggaggaagggtgaggrcccaggctggggatcgggagaagtgatggcggaggaaagagaggccggaagaggagggggcctgctggcctggcactggaaagcaaagcgtgggtttgtatatgggaagaagaccacatcccctcttatcgtcatcccaactcagaaaccatttggccccaagtcaccaaagcactcataggaaccacttttcctgtgacacaagtaggattctcccacttttaacttcccaaatgctacccgaaagcctctgaaatccttggaaatttaaaaaataatccccttctattaactgatgcctataaaacatattgactttcattaaattttgttatgaaatcagggatgtgtcccattgtaaaataaatttgtttggaaaatgtagggtggtatcccatctaaaaatcagacgaggctagaaaatttcaattttatttgctaaggtagcatcatgttgttaaaaatgcatcataaaataagaccaagagttaatacaaagcatgaagtcatgtttccctcaaaaaaatgatttgttctgtagtcaaattaatttggaaaacattgcaaactcttcagcagtggttctcaaagtatagcttgygtcagaatcccctggggcccttgctaaaatctggatggctacactccccgcctagagtgggttaaactcagtgcccactggcaggaaactgaaacttggctgaagtcaccgaggaggccttccccgttaaacctctggctggcgacagcttggtttcctcgccgctgcttctgagtaattctggcacgcagttcctcctagccacctgctgtacctggaagggggccagccctcctcagcaggctttgctcctgccctgcacagcacaactgtggcgtaaaaaatggaaaagctggtagcagaaggaaagagcagggagacagaggttaggtgaacctcaatgrcctcattaaagcaaattgagaaagagagtttccttcccagtgaggcgggacagtgcagaaatgcggcccgtcctgggagaagtaggggcgaggggtggggggctcaccgggcacatggccaacagctggtgcccagcctgggccacagtttggcacaggagaaagctgaagatgcaggagaaagctaggtcactgcccctaggccaggtgatcaaggtggctgttacctgcctgtgtggccttgaaaaagcctggtgccctctctggcttgcagggtccttctttttacaaaagcgggtcttcgaagccctgaatattccagttatctgtaaggatatagaaatattttgcctctagatgacatgtaaatatgttcctcctaactccacttcttcctacatctgtggcttcttctgagaactaccagacccaccctgttttcagagtaaacctcctgttttgaggtcaaacagacccagctgggtaattggtgactcactcctggttcctccaaagaacaggggcaagggaccacccgggacctcaggygccccagcacaggacctctttctggggcaccctctggcactgggccatcttcaggccctacagggctctcggggcctgsgtaggcctctcatctcccagaaataagttcttttccccacccagactgacaccagatgctacagtgaggtttacccctccagcttgacaagcattcctagcccagaacactcagctgacgaggggtgctgggggaggaaggaggcagcaaggctgaaagaagcttctctgggtattccrgtgcctggctgctggtcgtagccatggtgagaccacagcagcctccctggaagcaagcacctgtgtaaaagcccctccttccccacaaggggctggatccaagtgaagaaggtaccagaaggactggaagatgatgctggtattattcgacagctccagggtgctgtagcactgagcacctactgtatgcagcccatcacaaagccagccacactgcccaggctgtgccatggcaacttccagcagtacaccctctcggtcacctgcaggctccttgttcatcytgacacatgaggagaaaaagacagtactcacaaaggcctctagccttgtggccccaggaccctctcctgagcatcatggcctcctaggagacccagggtagccaggacaaaggagagaagcatttgctaagctaagaaaggatggaaggggattgctgttctgcctggatgcacccctagacctggcagggcaggcaggagagacccccagtgtctcttgcttatcctaggagttcccccctgtggttgctccagtttgctgccttcatgcatgttcacagggtgattcccctgagacaacagagctgggatgtcaccaagccctgtgtcccatcagccaggctctccccagcctccatcctctcattctgctggatcaggaggatgtggggaggtccctgactccccagctttccccatgacaaggtgtgtgtctacagctcagacccagccatgctccacctgagaagtgggtccaggcagagcactgggtcctggccacctagggctgcctcctcaggggtgggcaggaaggggagccactggaggagtgccccgggcacagtcccctgcaccaggtgaggtcacctcttagtccatgaggcgatgctgcatgagcccctctggacactagaaggcctgggctcaatgctgagtaaagtgcaggcatgactgtgccctcagcatgcatagggcagcrggcatagattcatacacgtgagtttgcacttaagctgcagtaagagctacagaggaaatgaacagagacagcatcactccagtgagccctccagatacaccccatgtgcgcagtaagagaatggcatagtctattgggacagccacatcaaaataccacagaccagatggcttaaacggcagatatttgtctctcacaggtcyggaggctagaagtccaagattagggtgccagccaatccacttgctggtgagggccctcttcccagcttgcagatgtctctgtgttcccacagcatggtcacgtggcagagagagggggacagggcatgaataagccctcggtgccttcctcttcttacgaggatgctaatcccatcacgggtaccccaccctcgtgacctcgtctaaccctaatcacctcccaaaggccccatctcctaatgccatcacactgggggtcagggcttcaacacatgaatttggggagcacaatttagtccacagcagaaaagaaaggggcacagagcattccagcctgaaggaaacagatgtgcaaaggcccaaggcaaaggcctgagctctgaggggcaaccagagtcaaggctgaagagtgggcagtgattgagcactgacggtggagaggcaacaggctatcttgttaatctcagtcttttgtgtgccagagagagaaactgaggcacagtgtgtcatggtgaacactgggcagcactcccacgctcctgtcctgcactctgcagggttatggaggaagcctgggaagtctctcccctcttttccacctttcctggacccatcccacaccctgcctcctccaggaagccctggggattgctcatacactcacatctcactccttagtacctgcagcctgcattctgaatttagcaagctctggccttgggtttctattttcttgtcctgtgcagtgagcatttggaaacttctcctcagcaccaarcacggagccatttagcagaaaatacatgagttttcaagtcaattgaactgttcatcgccccaaaagccaggcaacacggtagagcagctggatctctgttcgtagaagctttctcagggactggcccaccgagtgggggactgcaagtgcccgatgagtgaatgaatgaacacatgtgtgaatggaattcaaggcactgcaggctattctggagggtactggcctgtctcttcgacaggtgaggtgcagtagaacagcatcccgtatagatgccagtttctgacctggttctgaaaagccagtcacctacctctgcagagctgcctggagggggcgggggttgtgaggacccctgagagcttggtgtgaaggggctctgcagagggaggcatggctagtgtgcgcaaggtgacctctctcctggtctgcaggatggagaacctgttcatcaaccgcttcatgcacatgttccagtcttcttggaatgacttcgccgactttgagaaaatctttgtcaagatcagcaacactatttctggtgagtgtgcctctgggggcccaagtggtgctggggacaggggatgctgctctcctgtctgatacttgccgggaaattgacaagggccttcctgcctgctgcagcatgggggcctcgctgccaccatgccaccctggacagcaccccctacactccacaccttttaccatcactgtggtcacccttgtgcccagaggtttctcctcctcagatattcaagctcgagcaccctcaacctcatttcactatcaaaagtctcaaaagtatcagaactttttcttggcacaaatcaatcatttgtgcttctgaacagagcaaaggcagaacttggcttgtgttttaggtatttacacaaaagcaactttgggttcctttggactaggatgtgtttgatgagagcactagcttcatagtggcyagtcatggcatgggaaggacgttaggaaggcaggaatggctggacaagaagaggtgctgaaatcaggacatggggaaccaaacttggcaaactgcccccagggactctcctccacgccctccttcttccatcctggacactccatgctgggctgaaggacctgagtgctccaggaggcttctgagccacgaagggccagctcaggtatgatgagttggtgccacagcctgacccagtgatgggcagggggcagcagttggagctgtgcccatccagggagcactcgggagaggagaccaagcagggactctgctcttaggtgaggtcaggagggccatggccctggctgccctctactcagagctcagggtgggcctcgcttttctcctggtagagcgggtcatgaatcactggcaggaagacctgatgtttggctaccagttcctgaatggctgcaaccctgtgttgatccggcgctgcacagagctgcccragaagctcccggtgaccacggagatggtagagtgcagcctggagcggcagctcagcttggagcaggaggtccaggtaggggttgatgggctggggaagtggccaaggtcacagtctgtcaggtggaagccagttcctcctggccagtgctcataggccaccaagacgctaactgcaggcccatctggcctacagcagcygcttycttttcctggcagcagtgtcagccagggtcctgggcattatgcagactgtcttgtgcaacatcagaggaggaattgcggggaatgtttctccatgatgctcgagtctgggaacataatgtcaatattttcactrtcagtatcaataattacaggagctacccttgattaggggcctgtggtgggacaggcattgtgacaggtgctttacacacaaggtcatcagttgtcacccaccttgcaaaggggagaacactggagaaagaagcagaccttgtgtgagaataaaaaaggggcacgaggagaaacccaacagaatggttgattttctckttagaaatgctgctgcccatgctcctgtcgcaccctcctccccaccctcacctgcagactcagctgcctccggctgcaaggctgacctagtcttgagacagaagaagttcaaaccaactccacctggatctggtggggctcagcaacaggcgctggcccatcagcctgcctcttccccatggatccagcgtgatggggcctcctgccacccaggccctgctgcctatccccaggtgtccaggtggcctctgctgcttccagtcttttgagctcagcttaccctgaggccctagttggagagggatggttggtgccctttagagataaacctacagccccagtacctggcccacctgaatctagagggccacccacccagctgaagtccctgggcaagtctcctgccccagtgcaggcagtgtttcctaacctcctcctcctcctgcacccaaccaggcccagaacacttcctggtcatgtgaacagctgacagttacaatcccccacacactgagagagcatctgtgttcctgagtggactgaattgctagatgtagtaacattgatttggtggctataggtttcaaacttcaagtcagagatcatagaactttaagccatatagaatcctagaattggaagactctgagcagccatctctgcacccagcagccaaggagtggccatcctcagcacctggcagggcatcagcctcccactgggagtcccggccacctccagggcacgtgggttatgagtcacctttcctttgagctgacccacccctcactgactagactcttaaacacacactgccccgtctaatacacaccagyatgattcttaatccccacagtcattcacgctgcccatctggcagcaccttaatgatctacagcaagcttgtggcctactaaaaacgcctccattgttttttaaartgtgcagttattttccggatcatgaatagagaaattgtatccctgttgttggtattgattcagtgttccagctcaagtttgagttcttagactttatatttggattctttggtttcaaatcacaaaaatcaactccatctggtttaatccaagaactctattggctcaggcaacagtaaaaagcaatgctaactcatttgggaccagrgctcagatcatcccctgcactgtctctctctcgctccatgtctcaatcctctgcctctggtgattttttccttaggagggtttccttatgtggaggtaaaaaatgatcaccggcagcttcagatttaccttccaccagcttagcaaacaccacccactcccagcaagaaagaccctgtttcccaatgctcccagcagatgtcttaggccatcctcgggcctcactgattctgtgagccagtgcccacggccaggagaatggaatacactgacctagaggggacagggactctagacaggcaaaaactccactgtcagaagcagaatcctaaaatgtcagaactgaaaggtaggcccgcccctcgttttccagaaatatgaaagggaggcttgggataacagagaaatgctgcaggcattggccccaaatctcaggcctcctattcccagtatcaccttcaccagcctgggtggtctcaagattggattagcagccattccttctgggtagagtctgatggtcacttcagctctcaaagtccagctatccagccatagtcctagaaggcaagacatcactgtgcccgaccaacccaagggtctccacctgcccccctcaacacaaggtgccctgagtgcctccgcggggatagtccccgtccccacccctgcttcccccgcccatcgcgacagatgctcagagctcatccctggtgtcacaccacataaaggaggagggcggtggccaggctccgagctcctgccgtcctgggtgggtggcttctgtcctgcgtgccgccgggcagcccgggggtcctgcgcgcgggcgcggtcggtggagctgcaggggggcgctctgggatgtctccaggcagagtagatactgacccctccgcagccgggaccctcaccctttccttcatcactcaggaaacagaaaaggcttcagaaggagcggccatgcccccggcctaagcgctgcgttcccggcccagcaggcctaccctgcacctggcgttcctaggggcccctctgcgggacccactgcgcggctcgcagcggccgcccgcctcccacttcaccggcacgctcgttgcgtgtcgaggtgtgttgactcctacagcaaagggcacggatccgcgggtcagcaagcccgacgaatttacaccaatgacccgccgtgtcgccagtctcagaccagggcacaacacgccaaccctgcagaccacccccacctccccagccactgcagacccttccccctctgcttctgcagcacctctcccgaaacacgctcattcccgcccccgcagaccttccctacctcctggagaccccmctcaacccctgtagagtcccctgcccgtgcagaatcccctcccccttcccccgcagcccccctaccccacccggcggacagccccgcctcgcttcctgtctcttcctcccaagggagacccctgtcctggctctgactggggttgagttcgccagttttgacttatgtgtagagtccggcagcatcattttttggcatttaactcgtcacatctatttcacctaacctctttcttcttagtraactgacactcgggtcggtctctcatctttcgtgccagtcaagcaggtttcagacaccacaaatgccgaatgagctgctgccattccttcatcttaccccgaactgccacaacctgtgaacaccttccatgtgaatcaatcagccttggagtcagaggagagaagtacacattctgagctccgctgagtcgcaggaaagggagaggggtgcccagaggtcatcactctttccccaggcctgatttttggtccrtctgctgagcctgatttggacacatctctctgcctcctgcagcaagggaacattttcatcgtggactttgagctgctggatggcatcgatgccaacaaaacagacccctgcacactccagttcctggccgctcccatctgcttgctgtataagaacctggccaacaagattgtccccattgccatccaggtaggctgctggggggcacacctttctgagcagctcagtcctcygcgatccagggctcctgggtggctccattcacactccagctgaggaagctatgtcttgaaagacactagggcttcctgcaggccctgaggtgggctgtccataggggcggagagggttctactccccaaggcacacttgagaagcccctggccagtcgaggcrcactgtggaggacctgccctgggatcatattctgcactctccaccccagcaccctgaccaagggcccccagtcaaggtgctgccaggggccaggcaggtgaagctgtggactaagctggagaccaagaccactgaggggcaccatgggttctggggtcaggaaccaggccagtcctggtatgccacctttgatgatgatgtgagttcttatgtccaccggagatgaggcaggaggaagagggagaccctggaggaaaggcaggcgggcacagggctttgtctccccctgttcctggcaccagcctgctgccaggctgggagctggtgtgcagacagcaggggccaaggccaggactggactgggcataggtccctgggagtagggaggaactgcgcagaggacaccgtgggagactggcagatgagcattcagcaaataatgtccatgaactggaccttgggagctgtggacacaatagcagctggataggtcaggcaccagccacatgccaaggctatcctatgggttaacctgcacagtccgcaatmccttaccctcgattctaaatctaaaaaatctgaaaactgctgcatatttcaaaactgtgcagcaaattcattgtttgtaaacaaaccttctttgaagcaataggtgaggttatttagaggctttttccattcaatgtgatatgtatgtggatcactgcagaaatactgctctgttcgattgtaaaatagtatgttgccctagactgggggtgggagggggtatggcacataatgaagtatacccacwgctaaaatcctaaaaattctggattctgaagcacatttgaccactggggttttagataacctatctttatttgtgtaatcatcaccacaaccatcctaggtagtgggctctattgatgttgatcattttacccagataagaaaactgagacacaggtgcccacagccagccacagagctaggattcaagccaggtcatctgactctagattccagcctccccacagtctcccaggggcacgtagcctcagaggagcttcctgtctgttaccagagagaagccctgtgcctaagaaactgaagcagcaggtaaagggacaggtgacctaaaagaagacaaaattgctgggagatccccggagatcccaggcaccactgatggtgccttcaaaagcttggctcagagatctcttggagcagcctggagtcaggggcctagcttaaattccagttcagccacttgctagcaggctgtgggaccttgagcaagccacagaatgttcctgggtctctttcttcttctgaaaatggaaactttgcaaactataaagactcaagcaaatgaaagccagaggatagtaaatccaagatctggttctttgaaaggtccaaaaaataataataataacctcctcatgaggctgatggaaaaaaagagatagaaaaaaaaaatgcaagattcggaataaaaaaggaatcataaaaagagtaattatagccaggcaccatggtggtacacaactgtagtcccagctacttgagaggctgaggcaggaggctcacttgaggctgtagtgtgctatgatcacacctgtgaatagccacagcagtctagcctgagcaacatatcaagaccccgtctcttaaaaaaaaaaaagaacagtaattatgattacatattttttaaatgagagtaatatggcaaaaatttgaaaaattagagaaatggataaaaacctaggaaaagataaattagaagaaattgtagaaaataggccaatttccatatagtgattggaaacagacctacacagcgagcagctgagtctcacccagccactagacagctgacatttccagggctctttatcagccccaaattgatcatataaagctggtgtaagcttagttctgaaactggatacaggcaggcttcaaaagaaggctgaagaccaatccaagtattaaataaagatttaaaagaaaactaaaggtgatattagcgaagtgagtgcagcagtgtattaaatgactatatgtaataaccaagcagggtttattccagatatttcaatatcaagagagctaccaccataatttattatacccataaggataaagtttatgattatatcaattcacactaaaagggaatttaataacatttaatagccacaactaataaaaattaataggaggaaccttactttatatgataaagatagctaacatcaaaaaggtgcaactctaatgccatttccattaaaataataagaatgctgatatcactgtttttattcaacattattttagaggtcataccacatgataaaacaggaaaacaatcaataaacatattgtcaargaacagggaagatgatcttttctggtaatgctatggtagacctagaaaacacaagagattctaatttttttaaaagctactagattaataaattcatttggcaaagtgyttagataaatatatttctcaaaaaaatcaatagcctttctccatactaacaataaaatataatgcccatataaggaaaaactataaagttatttatttatttatttatttatttatttatttatttatttgagatggagtttcgcactgtcacccaggctagagtgcagtggcgtgatctcggctcactgcaacctccacctcccaggttcaagcaattctcctgcctcagcctcccgagtagctgggattacaggcacctgccaccacgcccagctaattttttgtatttttagtagagacggcatttcaccatgttggccaggctggtctcgaactcctgaccttgtgatttgcctgcctcagcctcccaaagtgttggcattacaggcgtgagctaccgcacccggccaactataaagttattttaaaggatatacaatgaactcttaacagtgatttgatattggggaggaaactgtaaaaatgtcagttctaccaaattctattataaaaacttaatgcacttccaagtaaaatttcagccagaattttttatctttcttggtgsgggtgtggtggtggtgaagaggaactaaaaaggagagaaaacaattaaaaaattgaaagattcatatggaaaaagaaatctagcatagtcaaaaattttttgaaaaaaattaaaaccacatagagaggcagggcaaccaagtgagacctcatgtcttaaaaaaaaaaaaaattaatagaaaaaattaggtatggtggcgcatgcctgtaatcccaactgctcaggaggctgaggtgggaggatggcttgagtccaggagtttgaggctgcagtgagccatggtcgctccactgcactccacactgggcaacagagtaagaccctatctttaaaaaaaaaaaaaaaaagtaaaagaaaacacagaaggaacactttccttgctggatttgtaaggttactgttaagcagacactgtgcttgaaaacagagagaattgggggacagtatagagtaagatccagaaatggactcccccacagaggaattcagtgtatcacaatggaggtttttcaactcagtgaaaaagggatattattttaatgatgctatcacactgcctttgcatgagaagaaaattaaattggactgctctgtcatgccatttacaaaaataaatctcatcatgtagaggagttgcttagaagaaaaagaaaaaattcagatgaagtaaaaattaaaatgaaaaaagtaaacgaatttagaaaaactaattacgcagacactcagaagacttttagaaggaaaaggaaaccaagaagttataaggggaaagctaagcatatttgattatgtaatgttttaaaacttgagtgataaaccataaacaaagccaaaaagcaaaacagagattagggtgagtaaccataacagaagtgacagctaagagatgcctatctatgatacacaggtagctcctttacattgacgggaaaataccaatactccagtggaaaaatgagcagagaatatgaataggcaattcacaaaagaagaaatgtaaatgggcaaccagcatatggaaaaactcctaacttcacctgtagttagagaaatgcaaatgaaagttaacaatgagatatcatttctgacatgcctggttggaaaaacaaaggggtaactcccagacaccagcaaggacggagccccatgctctgctcatgagttgttgcagcctggcagtgttcacgggataactggtgggcctgggcagcccaaggtcagagcttcggccagcaccggagcaaggtcagagcttcggccagcaccggagcagatcccacagcgcctgctgtaccaggtgcatgttgcagtgggcggtcagagggtcctggggttgaggctgtygtggcgaggacagttgtgttaccgagctggactgggatctgcttgcccagtgcagcaaaaccaaacactgagattgggatakaatctasgagaacacaaggcatttattgcggggaccaaaaaaggagaattgggcagctcactcttaagaccggaactccctgatggcttgcaggtaagggtttttaaaggcagagtgaatttcaggaattgcagaagttaacaggcaaaatcattaatcaatacatggagggtacacattggttttggcctaaaagggcgggatatcttgaagtgggggtgggcttccaggtcataggtagattcaaaaatttgttgttttgaaattggttaaggaagagaagtttcatttaaaaatttgggttaccagaaaggaatgttagctgtggcttgtgggcgggacttcccccaggccccccaggaagaaatttagaacaaagagcctgctcagagttcagtcctcagttccgtcttatctgaggtctctgtgccagtggatcggtttggtgggggtctgggtttctgaaaaacaactcagagacacatgttcaggggttctctttagtttccagagggaaccaaacagcccaggactctggcttccttggctgttgttttaggctgctgttaccctcttgtttgtcaagttgctcatttatttctcagggctagctaggtgcctggaacttcccttcaaggaactcgggattttccttcatttccatgccctgttgcggggctggggggctacagtgccctaagaggaggcccctgccccgtctcaattggaggagcactggaggggactttattgtttaagtgttctgacagccagtagcactgaacaggtgtgcaccaggagagtgaaactgtctgaggaacagtagggcaggcactgtctactcgaaaacatacccaaacccccaaggctcagccttcgctagcagccactcagcagaaatgaaagcacaaatgtgtgtgggtagcaacaggagcatagtttgtgatggggaaaaaaattgaaaacagtctgaaggcaraaraggattgagtgagtgagcccttccatgtcctcaccataaaatgttgaggcgtctttgaaaggaatgctttggttccctyccagctgacctggaggggtctccacaatgagttaacagtggaaaaacaagacacaagggaccgataaaggatacatatctgtcgtatacaaatagctccttcaaactgctaaggcaatgggcatggtctcacttatgtaaaatgaatgcaaggatgcagcaggcctactgtgccagcatggggacacaaggacgcagtgtcaccaggtaggaacacagtgatggcccagtgggggacaggtgagcaaaacaaagagacagatgttgattataatcatattcagttgatggaaaattggacagataaatgtgcacacatgcaaagacctatgaaaggaggctccccagaatttggtggttatccctgggcgctggaagatgagatgatgttttctttctcaggctctcctgtcatgactcagatttctttttacgataagcacatattcttttctaatcagaaacgcaaagctacttccttacccaaaaaacaaatttaagaaacacaaattgctcagggcaagttctggcatcccatggcaggccaaaatcctggacaggagtgggaggatgtgaaggatgggttggggaaggcccagctcagtggtacaagagctcaaggagatgggcaggtgaggcccggtcaggccgggaggtgaagagaagcagaagggagagtgatgggctgaaataggcagagcactgggcccatcctcattcagctctttttttactggtcagaacagtttttttttttttaatatataaaattttagattcaggtacatgtgcaggtttgttacatggttatattgcataaygctggggttaggcttctatygaacccatcactcaaatactgagcatartacccaatacccagtttttcaaccctttcctccctccctccccttcctggagtccccagtgtcttttgttcccacttttatgcccatgtgtacacaatgcttagctcccacttataaataagaacatgcagtattcgattttctgtttctgggttaattcacttaagattatggcttaagtgccaatcctaagctgcatccatgttgctgcaaagaacacgatttcmttcttttttrtggctatgtagtattccttggagtacatgtaycacattttctttatctggtgccactattgatgggcacctaggttgattacatgattttgatattgtgaacagtgctgcaataaacatatgtgtgcctatgtccttttggtaaaacaatttcttttcctttgggtaggtacacagtaatggggttgttgggtcaactggtaattctatttgcagttctttgcaaaatctccaaactgctttccacagggatggaagtaatttacactgccaccaacagtgtgtaagcattcccttttgtctgcatcctgccaacatctgtcatttttttactttttaataatagccattctgactggtatccctttgtggttttaatttgcatttctctgatgattagtgatgttgrgcattttttcatatgtttgttggccacttgtatgtcttcttttgagaagtgtctgttcctgtcctttgcccactttttaatggtggtgttttttcttaagttcctcatagattctgggtattagtcgtttgtggatgcatagttgcaaatattttctctcattctgtaggttgtctgtttactttgttgatagtttgttttgctgtgcagaagctctttaatttgattaagtctcatttgtcaatttttgtttttgttgcatatgcctttgaggtctagtcataaattctttgcctaggaaatgtccataagattttttcctaggttttcttctagaatgtttaaagtttgaagtcttacatttaagtctgtaatccatctagaggtaatttttgtatatggtgagaggtaggggcccagygtcattcttctgcatataggtagccagtttttccaacactatttattgaataggatgtcctttccttattgtttatttttgttgattttgtcaaaaatcakttggttgcaggtatatggctttatttctgggttctctgttctgttccattgatctctgtgcctatttttgtaccagtataccatgctgtttttgttactgtagtcttgtagtatagtttgaagtcaggtaatgtgatgcctccagctttgtatttttgcctaggattgctttggctattcggctattttttggttccatatgaattttaggatttttttttctaattctgtgaaaaatgatgttgataatttgataggaattgygttgtatctgtagattgctttcttccaacccattagctgggatgtttttccatttttttgtgtcatctatgatttctttcatcagtgttttatagttctctctgtagagctctttcacctccttggctggatacattctttggtattttattttgtgtatgggggactattgtaactgagatcaccacgttcctgatatggttctcagcctgaacctgaacattgttggtgcatagaaatgctactgatttttaggccaggcacagtggctcacgcctgtaatcccagcactttgggaggccgaggtgggcagatcacctgaggtcaggagtttgagaccagcctgaccaacatggtgaaaccccgtctcaattaaaaatacaaaaattagccaggtgtggtaacacctgcctgtaatcccagctacttgggaggctgaggcaggagaattgcttgaacctgggaggcggaggttgcagtgagctgcgatcacaccactgcactccagcctgggtgatagtgagactccgtctcaaataaaaagaaatgctactgatttttgtacactgattttgtatcttgagtgtagaaagtcaaaagttttttttttgttaaggagtaaattatgtgttagaaataatagttttttctaaagactaactttttttaagccttttcgctttgtgctaataactttttgttaagccctatcatatgtagctgttagatataagggaatgagtacattctatgtccttgtactttaaccaagatatttgtgctggacgtgctcacaggcatgtcccagcttgcagcccatgccccttccttatttggaaatgttattacttttctaagtcctttcataagcaacttcctcttttcctttgtctttccactgcttttacctatttagaaaagttttaagttattagccagtcgggttttagtttagactgtgaggtttggctccagccaatggagacaggacacggtagcagggacaagctgcgtaaggaataaaaattgcttctctccattattcaggtgtgctctcgccattgttccatctgygaggagcaccctttctgcagaaagtaaaattggcttgctaaaaaaactttttgtctaaatgctgatttttccttgcagtaccgaggaacaagcattctgtttctaaacaagcattttacttataacattgagactttactgaagttgtttatcaagtctaggagtcttttggaggaatcttcagggttttctaggtatagaatcatatcatggatgaacaaagataatttgacttcctcttttttttttttcatttggatcccttttatttctttctcttgcctaattgctctgactaggacttccagtactctattgaataggaggggtgagagtggacatccttgtcttgttccagtttttagggggattgcttccaatttttgcctgttcaatatcatgttgccggctgagctctttacctactgtgtgacttgggagagctgctaaaccagctggagcctcagtttccccccatgtaaaatgggtacagcaaggaatayctgccttgcagggtcaaagtgaggattaagtgagatagcatgggtaaagcccctagcacacaacaggggggctcctcggccccagaggatgtcaggaacatgtcagtgtcccagagccatcaggaacatgtcagtgtcccagagccatcaggaacatgtcagagcatgtggggacatgtcagaaagtgtctcagagcatgccaggcagcccagcattctagggcacagatcaggtatcagtggcccaggcatctcatgcaaacgggtgtggcagtggggaccctgagagctgggactctgtaaaagggacaagagcgtagttctgtgagaacctgggtgcagagttctgagaccttctaatttttcaagaaaaccaggtcattcaaatttttatgtgaaactgtctggtatttaaaagcagccaactaatctcaagtataaacagacaggcacgcctaatgtgcaagtcacactctgctctccctcctscctcccccctccttggtcctcagggagtgctgaggcttctrgggtctctctgaccagggtggagccactggccaccagggctctggagcacttgggatttggctcrtccaaaccaaaacctgctgcaagtgcaaagttcacacctgatttttaagacttagaataaggaggtggggaatgtgaaatatctcatttaakagttttagattggtttcatgttgaagtgataatattctggatatattgggtaaaataaaattatattattcaccggcatttcacctgtttccttttatttttattaatatggcttcctgaatatatacaattccatgtgtggggtagcattatatgtctattggacagcactgttttcgagggagagacgcccaaggaccccaccttccacaatacttatagcaagtgacacagctgtgtgctctgggacagttctccctccccagccatgaccactgtgctgcagtgacactggtctttcccagcacctaaagtctggccatgccccttcctggccgctcttggctgcagccctgccacccacctcattctttctgtcaacccctccaataccccatgtcttcatgtaaaaatgggcaatgccagcacctgctgccggctcccgtgagaactcactgtcgggtgctgaggctgtgctgggctctcaataagggggcaacgtgcagggctgctggcatggagggacctggggctgggtgctggtgtgggggcacgaaagtgaggctgtgtgtacagaggcatcagcaaccaggtcaccacagagcttggggattttattttctggcattaagaggtgattgaggaggcagttaacatgacatgatttgcattttggaaaagaaaaaaactcaccttgtcccagtgtggagtggaaactggaaagggaagacaggtccagcctctgctacaggaggtgcctggccacaggtgtgggctccaggcagagctcaagctgcagaccctgatctgggaggctcagtaccaggagggccccaagcctttaaacaggaggagctgacttagggcaagaaaagaagacaggagcaccagggcagaccctggggagctccagcatttcagggaagaggagagggaggaaagtatgagagaccaaggagaggcagtagaagagggagcagggcaaggagggaagagggggacagcgatcctccccctccgctgctgggccttcsgcctgcccgctccttccatgctgccagctcctgagtaactgtgagccgagcgatcactgtccccacatgacagatgctgaagccggagcttagaaagcccagtgtgtcatccagagtcatgcaggttgtaagtaatatggctgggacaggaaataccaccgcagggccctttaccccctcyaggctcttctgattccaaagtcactgttaaagaaattcagatacttctggaacttcccaagaggcgaagttctccaacaactatactctgaagtgaaatatagcagtgtgtttcctttcccccaatgtatcagctcaaccaaatcccgggagatgagaaccctattttcctcccttcggatgcaaaatacgactggcttttggccaaaatctgggtgcgttccagtgacttccacgtccaccagaccatcacccaccttctgcgaacacatctggtgtctgaggtttttggcattgcaatgtaccgccagctgcctgctgtgcaccccattttcaaggtacagccagctaccgccccacctgctatgggagggcatctgagatgtggagtgggagggatcactgacatcccacagggggacctgtggctgggagtgggtggcagaaagggagccctggagagatgttctcagagtcagtratgcccctaaaggaagaaaacagctaggagcctgctgttccccaggacacgcggctggggcatgggcctgacacacgggcctcgctggccagccagtagagttggaaaaggcaaatgagttcatggtgatcctcrgctgatgctgatggccgcccctgccatcactctccgtccctgttctcgaatcctacaagcattggctgctggggtgactgcatgctaaaagtacccatgtgcctcagtttcctcaccagtaaaacaggtcaaatagtacagctgccttacagaatgatggtcagattaagacagtgaactcagggagcaaagaggtaagcattgtacaagtgctggccaggaccctctgaatcattatcatgcttagtaagcatcagaggggtgcaggcctccagcacttattcagcagaaagatcagcacccagccttcacttcctccctgcgcccagcatcatcctrtagggcaggcctgggtgggggagctgcgggtccctgaggcaccaggtcacctgactgggccccctctgaggcctcctcctctcccctccccagctgctggtggcacacgtgagattcaccattgcaatcaacaccaaggcccgtgagcagctcatctgcgagtgtggcctctttgacaaggtgggtgccctcctaccctacttgttgcctggaagagcccagcctggcygccttcactccctatctgagatctagacaccctttcaggaggcctggaagggtgaaggctggagtctgctcagagcactggctccagcatcctcctgatgtctccagcccgtgccattcagccaggagcactcctccaggcgcaccaccaggtcttccttctcactgatggctcctggtcccctcctcccacccctcccctctcccagcctctgggacctgggtgtagacccccctctggaacacactccttatggccccctgacctcctacgcaccaggaacctgtgtctgcctcttaatctgccacacccctgccaccctgacctggacctccccagcactctgcttcccgggtcccaaccctcccaacccactgtctcctgcatcggggactccaggccctgcccagccctcgcatccctcaggtagcaccccacctcgttttgagccctctgtagccttaccaagcttggactctcacatgggcccttgccycaaccttcctcctttccccagcccattagtgaccaggccagatgaccactgaagttgagacactgtttgggctgcaaatgacaaaacccaactcaaaccagctgcagctggacaagacatgccttatctcaaatacctggacacaatagagggtcgggggcctcagccagaaatggatccagggactcaagcaatgccccagggtgcatgcacactggctccctctttctgtctctttcacctgtgttggcatcacactctcctgctgcagacaggcccccatgggagagggcacaggagctcatcatagtagctccacctcaggttctcatgtggccattatctcccagccgcatctaaacagaaagtgctggggggcagctctggttggtcctgcttgggctgaatgcccaccgtggaccaatctctggcaccccagcacccaagtccttcttcaaaacctctgtggcaccgacagcccagccccctgggtgtatttgcatgtgtgtgtgtgcacgtggacacacatatgtgccagtgagcttgtgagtgtgtctgcatcactcagmagccgggatcgggatcaggaccaggatccctccttgtgggtctctccagccctcacctgagcacacaacaggccctcaacagagttgcatgggtcctggaaactgagggtcactgagagcaatgactgagggtcgtgtgctcagcactagagcagacttcacagcccaggcccgctggtgctggggtcccccacacacctgcccacgcctgctgccctcctgtggctgggagcgcacccttccctcytgtactckgcagccccacggttcagtcccttgcattggattgggcgggaggctcctccctakcacctctccacccggctgcccttgtcattctctgcgttaaacatccctcccccatctcacaggacaagggcttgcacctctgcctgcctggcctcctcgcctcccctggcacatttcctcagggatgggtctggacagctgtgggaggagccacccgctcagggcactctacctcccactccaggccaacgccacagggggcggtgggcacgtgcagatggtgcagagggccatgaaggacctgacctatgcctccctgtgctttcccgaggccatcaaggcccggggcatggagagcaaagaagacatcccctactacttctaccgggacgacgggctcctggtgtgggaagccatcaggacgtgagcgcccgcrgggcggtggtcctgggggaggagccgggacccctgcctgactacctggggcgggcctggcccctccacygctagcgctgaatggggacggggtgggggagtcccagcgtccgtgagggggttgccgccgggcaccgctccgcagacctggctgggtcgcccaccccggctgcgccccctgagccaggttcacggccgaggtggtagacatctactacgagggcgaccaggtggtggaggaggacccggagctgcaggacttcgtgaacgatgtctacgtgtacggcatgcggggccgcaagtcctcaggtagggcctccgggacgtctccggacccggctcccccgcagtcggcagcgctggcccctccgccacccctccggggtgtcctgcccaggrtgccctccggccttggggcagggaatccgggcacggggtgggygccgggccctggggtccycagggactgggcctcagcccgccggtggttccaccctaggcttccccaagtcggtcaagagccgggagcagctgtcggagtacctgaccgtggtgatcttcaccgcctccgcccagcacgccgcggtcaacttcggccaggtaggcagggccgggcccgctgggcagggctcccttctcaaggccgctgcctcctcccccrccccggttctgcacgcgtactgcaccctcggacagcctcggggcctggcacgggacttgcaggatggattctgcccgctcagccaagggcgctggccgcggggaaagaggatggacggactgcagggcccgctggagttggggggcacggggaggacggggcccagggggcagctgggcagcagggcttcgggggtgcccacgcttgctggcggtcgtctccgcagtacgactggtgctcctggatccccaatgcgcccccaaccatgcgagccccgccaccgactgccaagggcgtggtgaccattgagcagatcgtggacacgctgcccgaccgcggccgctcctgctggcatctgggtgcagtgtgggcgctgagccagttccaggaaaacgaggtgaagctgggcagggcggggcacagccccaggtcaccccaggttaagcggttcctcagcctcagggctttgtgactcgggccycaaggctcacttggagcaaaggaatcctgacttccaaggctggaagggcccagaaggctgcagccgccaccaggtcccccggcctcagcctggacagagctcagggtgtgcagggcaggagagcacacagcccaggctttgctcactgtcaccagagggtcgtgtgtgacgccccctccccccagctattgacaaagttcttgcacatgtgttttaccctggtactccagagggaatgaccaagagtttcctgggttccttccggacacgtgcatctcatttaacctaacaactgaatccggtgtgtcttcgtggatgcacccgctttggggtagctcagtactgcatagaatggccggaccagtccaacctgctccagactgctgggtgtctgagttgttcccggccaatgtgttggtccctcactggacatccttgtttttgtggctttgcacatgtgttcagtatgaccgcacacattcctagcagacaaattccttggtcaaagaatattgatactgaattgccctccacaaactaaattcaaaatcccattatcaatagcctatgtttcttggacctttccagctcagaagctttgtgatcttaatccaatacagtatttttttaaaatgatatctagctctgccccgcagacatctgtgtgagaatgcaaataagcacaggaccccaacagggcagccaccccttcaggctccctggcccgctttctgccttcctgggctggagaggccagtgctggccccagcgcccctgatgggaggtgagagtgctgcgcaggggtggcccaagacagcaggataccatggctgcaaacaccagcagcccccagcttcatctgcatcatctcgtaaccacttggcagcaggcagttattttcccacttatccatgaagccccagccctggagccttccttagagaagcaggttggaggcgacgacacttgccttcccgaggccctcttgtcaggcagcagagggtgaatatggggaggtgaatagatgctccctccttcatctcccaaacggtggctggccccttgggatgagacaggcctgtcagtttacacgggtagtggattgacctatgtgtgtgtccatgtctgggccctcagctgttcctgggcatgtacccagaagagcattttatcgagaagcctgtgaaggaagccatggccmgattccgcaagaacctcgaggccattgtmagcgtgattgctgagcgcaacaagaagaagcagctgccatattactacttgtccccagaccggattccgaacagtgtggccatctgagcacactgccagtctcactgtgggaaggccagctgccccagccagatggactccagcctgcctggcaggctgtctggccaggcctcttggcagtcacatctcttcctccgaggccagtacctttccatttattctttgatcttcagggaactgcatagattgatcaaagtgtaaacaccatagggacccattctacacagagcaggactgcacagcgtcctgtccacacccagctcagcatttccacaccaagcagcaacagcaaatcaygaccactgatagatgtctattcttgttggagacatgggatgattattttctgttctatttgtgcttagtccaattccttgcacatagtaggtacccaattcaattactattgaatgaattaagaattggttgccataaaaataaatcagttcatttaaaatgggtcttgttccatgtgttatattccaatcaccccaaacagctcactgccatctcccacaccaagagaaaaaaaaagccatagtcaccgtgattttatcaaggcaaaagcctccccacccaagtctggatagaaggtgctttttccctcaagcagtgtctactctctttggaacacatcccaaatgtcaccacctctgggaaggcatccttggttcctgtctctaccctggatttgtcagaacctctgttcttgccccctctgtggtctctcccttgggacacgagcccctggaaggacagaaaacccactttatttatgtctgtgccccagggctggcataaggcaccagcactcagctgttctctccttttcctcctggaagggcacctagctaatggatattaggcattgtcttgggagctgggggcttattttttcctgaggcagggttcttaacatgacataaaaaataaaaatgggcagggcgcggtggctcacgcctgtaatcccagcattttgggaggccaaggtgggaggatcatttgaggtcagaattcaagaccagcctggccaacacggtgaaaccccatctctactgaaaatacaaaaattagccaggcatggtagcaggtacctgtaatcccagctactcaggaggctgaggcaggaaaattgcatgaacctgggagacagaggttgcagagagtggatatcgcaccactgcactccagcctgggcaatagagcgagactctgtctcaaatagttaataaataaataaattaaattaaataaaaacgcattctctttccccagccccaagtagcagagcccgctctgagcctgggcatggtgacccattctcctcgtgctcacatgcccaactcccagccctccagcccctggcttcggaatcatgtcatcagggtctcccatgtctctggaaggtgcttccagtgtggcaggccatcagctcagtgtctgggtaaaggcttctacagggccagcatggcataggggggaggtgtgcatgcgttcctgaagccacaaggtcttctgaggagacctgactattggggtggggactagagactgaggtccagccccttaatgccccagactccctgccatccctcggagaatttcccaccacacttatgaatgatcttcgggacaggtgacataaacatacagctatggtagaggcattcagctccatgccactgtgagaatgaacataccaacttttaggcaacaaggccatgtggtcaaggagagaggagaaacgaataggagtaggcaggggtggtgaagcaggtctgacattggcaaaagtgacagagaaggattgggttggaagggcttcagatggcagagaacctctgaaaaagtctcatgccagctaatgaagagtcctcaaagtcaccatcacagaaatcttacatctggcagaaatgacagcaatagtttggcatgaaccccacagtggatccaaacgtgtggcagctgagatcgtcagttaattatgttctctgcagctggtccttctggttccctggagctgggtatctgagtagcacagctccactgctaccacaggagagggagaatcccaaattctgtgcatagactgtctaaacctctggatgacccctaagacacatgtacataaggcaaactgcaaacagcccaatttaggataaaacagcctgtcttactctgtttgtgctgctataataaaatacctcagactgggtcatttatatagaacagaaattgattcctcacagttctggaggctggaagtctaagaggaggcactggcagtttcagtgtctggtaagggagggatcagtgtctgctcccaagaggatgccctctgtgctgtgtcctcacccagcagaagagcaaaaaagggcgaacattctcaaaagcctcttttataaggacatcaatccattcatgagggcagaaccctcaagaattaatcatttctcaaaaggcccctcctcctaatgccatcaccttggggtttaagttccaacacatgatttttggaaggacacatacattcaaatcattgcacaaccaaagtgatatttgaactttcaaatagtttgcagtttgagatcaactaagttaattgcttgcttgaataaaaacatcacagccgggcacgatggctcacgcctgtaattccagcactttgggaagccaaggtgggcagatcacttgaggtcaggagttcgaaaccagcctgaccaacatggtgaaaccccatttctactaaaaatacaaaaattagccaggcggccgggcgtggtggctcatgcctgtaatcccagctctttgggaggccgaggcgggtggatcacaaggtcaggagattgagaccatcctggccaacacagtgaaaccctgtctctactaaaaatgcaaaaattagctgttgagactactcgggaagctgaggcaggagaattgcttgagccgagatcgtgccatcgcactccagcctgggggacaagagcaagacttcgtctcaaaaaaaaaaaaagaaaagaaattttctggattaggataatgttctatatttggataagggtttaggttacctagatagatacatttatcaaaagtcatcaaatggtacacttcagatgtacgcatgtcactgtatgtaaatattaccccaaaatcaacaagaaccatgagcaaatactgacttctagtgaacgacatgcatactgaaactttcgtagtgaagtataattatggctgcagttgactctgaaatacataaaaacctaagttgatgggtgaatacagtgattaatagatagaaatctgtggtaaagcatacggagaaaaatgttaattgtagattctagggtttatatatattctcactatataattaaacgtttttatgtttaaaaatttttataatgttgaaaaaccatgaaatcctacctaacgcagtaagacaagaaaaagagataaaaggtatatgtactgggaagtaagaaataaaaccgtctttgttagcagatgacatgctcatctatgtagaaaatccaaaagaatggataaagaaactcctggaactartaagtggttacagtaaggttgtaggatacaaggttaatatacaaaagtcaatcactctcttattcaccagtaatgaacaagtggaaattgaaattcaaaacaaaatactatttacattaatactccaaaaatacatacttaggtttaaatctaataaaatacatacaagatctttatgaggaaaactgcaaccctgatgacagaaatcaaagagaaactaaagaaatagacataagtaaatattccccagaaagactcaatattgtcaagatgtcagttcttcaaaacttgacctatagattcaatgcaatcctaatcaaaatctcagcaagttatgttgtggatactgacaaacttattctttttttttttttttttttttttgagacggagtttcgctctgttgcccaggctggagtgcagtggcgcgatctcgactcactgcaagctccgcctcccgggttcacgccattctcctgcctcagcctcccatgtagctgggactacaggcacgcgccaccatgcccggctaatttttgtatttttagtagagacggggtttcaccgtgttagccaggatggtctcgatctcctgacctcgtgatccacccgtctcggcctcccaaagtgctgggattacaggcgtgagccaccgcgcccggccaacttattctaaaatttagatagggaagcaaaagacccagaacagctaacacaacaatatagtaggaaaacaacaaatttggaaaatggatactacccaactccaagacttactataaagctacagtaatcaagatagtgccgtattggtgaaagaatagacaaatagatcaatggaacagaatagagagcctaagaaatagaccttcataaatacagtcaactcatccttgacaaagtagcatagacactacaatggagcaaagattgtcttttcaacaagtggtgcaggaacaactggatatccacatgcaaaaacaaacaaacaagcatgaatctagatacagaccttatgctcttcacaaaaattaactcaaaatggattatagatctaaatgtaaaattcaaaactataaaattcccataacataggataaaatctagatgacctaggtatggctatgactttttagacataacaccaaagccatggtccatgaaagaaataattggtaagttggacttaattaaaattaaaaccttccgctctgcaaaagaccacactaggagagggaggaaatatttacaaagacacatctgataaagaattgttacttaaattatacaaagccttcttaaacttaacagtaaggaaacaatctgattgaaaaatgggccaaagactttaacaaacaaaagaagatatacaaatggcaagtaagtatgtgaaaagaagctgcacagctggggggcgtggtggctcacgcctttaatcccagcactttgggaggtcaaggcgggcagatcacctgaggtcaagagaccagcctgtccaacatggaaaaacctgtctctactaaaaatataaaattagctaggcatggtgatgcatgcctgtcatcccagctacttgggaagctgaggcaggagaatcgcttgaacccggaaggtggaggttgcagtgagccaagatcgcgccattgcactccagcctgggcaacaagagtaaaactctgtctcaagaaaaaaaaaaaaaagctgcacattctatgttatcagggaaatgcaaatttagaataacgcaataacaagataccactacatacatattagaatggccaaaattgagaacactgacagcaccaaatgtggaggaggatgtggagcaacaggaactagagagaatgcaaaatggtatagccacttaggaagacagcttggcagtttcttacaaaactaaatatactcttaccacacaatccagcaatcacactccttggtatttacttacatcccaacaaaaaccctcatatggatgtctagagcagctttgttcataattgtcaaaacttggaagcaaccaaagatgcccttcggtaggtgagtaaataaataatatccagacaatggaaataccattcagtactaaagagaaatgagctatcaagccatgaaaaggcgtggaagaaactgaagtgtgtatcactaaaagtcaatctgaaaagggtgcataagtttccaaagatatgatattgcagaaaaggcaaaactgtggagacagtaaaaagattgccaggggctagggcagtgggagggatgaataggcagggcacagaggattttcagggcaataacactactctgtatgacactataatgttggatacatggccagatccacagaatgtagaacaccaagagtgaaccttgaactatggactttgagtgatgaggatgagtcagtgtaggctcatggattgtaataaatgcaccactgtgggggggggggatattgataactggggggctgtacatgtgtagggacaggagtaaatgggaaatctctacttttgttaccggtggagggtgtaccgcattttgaacaaaaaattggacaaaacgcacaaagcaaggaaagaatgaagcaacaaaagcagagatttattgaaaacgaaagtacactccacagggtgggagcaggcctaagcaggtggctcaagggcctgaatacagatttttctggggtttaaataccctctagaggtttccattggttacttggtgtataccctacgcaaatgaagaggatgaagggaggttacaaagttatttacttggtgtagaaaattagggtttttcccttttatttagttgtaggaagcccttaggttacctgcctccagaccctattctcctgcctcattttattcctaattttgttgtg

SEQ ID NO: 94217 - DNA, 67603 bp, Homo sapiens
agggattcactatgttggccaggctggtctcaaactcctgacttcaagtgatccacctgcctcagcctcccaaagtgctgggattacaggtgtgagccattgtgcctggcttcagtttcatttcttacaactacttcctatgcaatccacacccccatcacactgaactcatctcaatttcttccacacactatgcacttatattatgaacttcatttctctgccttgttcagactgtttcatcctatgaaattcaattccccttcttttttggcctgatcattctgcacagcccagtacaacgtcacagtcttcattaaactcttcacaggccccacagtcttaattctttctgtattatcaatttttgttgttgttgttgttgtttgaggcaaagtcttggtctgttgcctaggctggagtgcagtggtatgatctcggctcactgcaacctccccctcccaggttcaagtgattcttctgcctcagcctcccaagtagctgggactataggcatgcaccaccatgcttggctaatttttgtatttttagtagagattggatttcactatgttggccaggctggtcttgaacccttgacctcaggtgatccacccactttggcctccctaagtgctgggattacaggcaggagtcacagcacccggcctctgtattatcaatatttttacttttgttttcttcgttactcaaatcaaatcactttggttaagcctggtgtcaaaagagagagaaaatataatcttttaccagtaaaaatattaaatatttgcaagcaaaagaaaatctaccacagtctgtccttctgattacaatcattcaggtctttttcctccctcaaaatacactcaccaagttggagataacttaaaagccctatactgtcattatttcctgctcaaagtcgacaatctatgaataatgctatagtctttatgtttgttcttgatatatctcctcttgatctggagatctatgaagaacaaagacaagttatttgcccacaacacccaaaatacaatggtgaaatgggaactggataactacaatgaatgatactactcagaaagtaaagaatggtcctgaaatttcactgtcttgaagttgctgctaacttaaagtggggaacagtccttgtttaggccctgattttgccattttgggattttttttcgggattagttccagtcgaattttctctgtggctcttgcctcacactctggcaagtcttgtcttagagctgtttaagaaagccattagagaacagaccctcctcggaatatgagtatgtctctctaccggcttcctacctgcaaaagatggaggagctcaagtgtcttttcatatttcaaaccatgaagtttctttaatccaatgctgatcattcttttcacagtacttactctacttctatttgatttcagtcaactccatgcgccaatgccacagccacaattctttttgagacatacctctgtctttctttagacttaatgtcagtcaccttaatcctatcacgctttggttggagagctacatccttacctgtttgtccagactttaaaattgttcagctgaaaggatttactgaaggcatcttaatttactgaaatgttttaacaaaggtatgatggccacattcttgattgggccattatcttcctatcaattcatctttgtagcccaaatgccttcccatctttattttagacagctagatatgagaatcaatcagatcttccaactctgcatgtctctaaatttctgaatgttttactccctgtcattacagtttgcaaactgaccaattattttgagtccatatctttattgtactaccttgtcaactgtagccaatagtaactgatacatgctaatatactctttgcctgctgtttcactgaaagctaccagctcactgggaacattaactgccttccaattaattgaaataagtgtttcaccaaatgttccaatactgcattacatatagatagccatccttctagtccctggtaacagttactttgtcacctactgccaggacctaaatcctatgccacatattttaggatttttattatggtaacatgtcaccacactttcagtgtcaaattatttacttgtcagggtaggctaggttatgccacattaagaaactactcccaaatccagtcacttgcaacaatagaggtttatttctctattttttttttcaagacagagtttcactcttgttgcccaggctggagtgcaacggcatgatctcggctcactgcaacctccgcctcccggttcaagcgatcctcctgcctcagcctcccgaagtagctaggattacagacacccgccaccatgcccagctaatttttctgtatttttagttgagacagagttttaccatgttggccaggctggtcttgcactcctgacttcaggtgatccacctgcctcagcctcccaaagtgctgggattacgggcatgagccaccaggcccagcctatttctcattcttaatacatgtacactgcaggtcagtagtggctctgttccaggtagttcttaccctgacacctaagctgataagcaggctgtatctagaatattgctagtcttgtggcagagggaaaactgacaacatggcacatgttggctcttaaagtttttgcttgtgcatggcatgtgctacttctcacttcgcatttgctaataaggcaagtcttcttattaagcttgaccctcatgaggcaagtgatatctccttctaggtagaggctgaagctatctgcatacaatttaatctacaacacataccaattccacttctgcagctcaggaattttgcgttgtttcttctaccatggcttctttttccagactgtcacctctacctgtccctacttaaaatataggtgacatactctttccactaacttcaatgtgcaaaatttaaactttcacaatttgacattttggttaatatttaatgaaatttatatttgtaaccttgctttgttaacatctctaaaggcatcacttaggccaggtgcggtggctcacacctgtaatcccagcactttgggaggccgaggtgggcagatcacgaggtccagagatcgagaccatcctgactaacacggtgaaaccccatctctactaaaaatacaaaaaattaaccgggtgtggtggcatgtgcctgtagtcccagctattggggaggctgaggcaggagaatcgcttgaacctgggaggcagaggttgcagtgagccgagatcgtgccaccacactccaggttgggccacagagcgagactccatctcaaaaaaataaacaaacaaaaataaataaataaaggcatcacttagctatctatattattgttgtctctagaagctaggtcaatgacaaaaaaaagttaagtctcgcgccactgcattccagcctgggcgacagagtgagactccgtctcaaaaagaaaaaaagttaagtcactggattttagtttctttttaataatggcatttctacatacctacttattatcaactgttattattcaaaataaaatattggaagaagaggtctcccttcttctaatttatttgctgaaagcctatctacactcactaaggtttctttgttcacttctaagtattttccatgtttttgtgctgatcttttaacacagccatgctccttaccatagcctataaggtccatgtcagagaattggacatagactttacagactccactgtttgctctcattttcctctttttctccttagttatggatcaaccacactgatacttttttaagcactcttcttcttcttcttctttttttaaatctcaaagccatttctcttactaatttagtgttcttcccacatctttaccaggttacttccttcctttcatttaggtttcaactcagaaatcctcagacggaccttccctgtcctgtctacttaaagtaacctcctctcctccacctcttccatgtcattgtctgtctcattattctattttattggcttgtcactgtctaaaaattatctcatttgtttattgtttgtcttcctcaattagtatgtaagctccattagcaacgcagagtaattttcttgttcactgctataactctagtggctagaacagtgcctagtggagagtaggtacttaagaaagatttgctgaatgaatgaaaaaagacaccagtcttgataagcttcatgacatatcaccttaacagttaccatctattttttttttcctacctactggccatacctcctcttctaagcattgcatgttggaattcctcggctctgtgtcctctgtctaaattctcagtcaactttctctccctaagtaatctcattcagtcacatgggttcatttcttatcaataaactgagtcctaaatttatacttatagtgtagttctcttctgccccatagagatccacttgaattttacataggcacttatacatcattctctacggcttatttcaataactggcatcaacaaccacagagctgctcaaaactgaacctctgaaattattcttaacttctctctcctcactcctggagagccaaccaccaagtcctgttggtgccaccttctaaacatctctggaatctttttttctcatcattacattctctacactagttcaagctaccattatctgtcacacagattatggactattgcaatggccccttgataggtctttcccctctcacgcttatcccttctaatcaattattcacaaagcaatcatttaaaaacacaaccttcccaagctctcaacataaaacccatgatgtttaagcggttattggcccagcagatctgatccccaccttgctctcccttttactttccagccacactagacctcatacagctccctcgggttttcaatagcttcagaccttcacgtgttattacctccgccctgtacacctgcatcctccgttttcacctggttaatgtccgctcctccttcagagctagtgtaacttccrgtggagccttctcctatgatttctagtcccaattattaatacttgcttgatcatttgattaatgctttaagctacgtatgagattggagagggttcagagtgtacattttatcccaatcccccccccctcccccgcaaagcctgtcctatggaagaccttcgggtaaaaaaaacaacgaagaaaacaaaacaaaagacaaatgaaaattcgactggggtagtgggaaagattatctgtagctacacgaccattgaaaacacattttaaagatgcaatttgggaccagggacgggggatagtggcgtgttggaaaggtctttgtggcgacgaactttcaaccgagggccaggatctgagggttcagaaatacactgccaggactattatcacctttaagtcatttactagtttttaacttctgcttgtctgcgacagcgtaacacaggaagcagctgcagtcttctcaaaccgcagccgctgaccttagcggcaagaggcccgacctgccctccaggcgcccggcgctcggctcccagaggcgccgcgcagctccctcagcggcagtcacagctggccagcgcgcacccggcacgcgcgcccccagggcctctgcgcgcggacccggctctcaggcgccgcgggagaggccccctactcacggagcgcgcggcccgtgcgcccacgctccgaccgcattcctcagtacgtggcacccttggaaagtgcctgtctggtcaatcgaagagtcctcgtttcgaccaaaaaaattcccctcagaaatatgcatggcacggcaatgaaggcatttcactatgaagtggaatgatgatggtccgaccaggtcaggacgaacatatgaggggttagatctaagcaggcactattaaagacagtcgcatccgggccctcctgccgcaagctgccctcccagccaagggtccttcaggkaggaggtcctgggtgactttggaagtccgyagtgtctcattgcagataatttttagcttagggcctggtggctaggtyggttctctcctttccagtcggagacytctgccgcaaacatgctccgccagatcatcggtcaggccaagaagcatccgagcgtaagttcgtgaccgctctcctaatgttttcccttgtccttcttgcgtcggggtgcgcctctttctgttccctgggaacgtcctcatttacagccacttaccgtccgtcagaccagaccctgcctcgcctagtgtttgtcatcttagttgtcccaggcctctgtgaccctctacgccatgcattgtggggttttgtctgacaggaggaaggagacggacactgctcggaaaaaaaacctagtttttyctagttagtgaatattggaacagtctggtggccgctctcttttgcaggttgtgcggtccaggagggatagatgtgcgctgtgtgggtcagagactagcataggtcaggttccctatgtgttataccatctctggaggttcttgtattcgccgcattgcaccaccaggccttttggtaaataagaggggtccgtgatcttggaatcctcactttgtctggacgtcgttgcttttgggaaaatttcgaagtgtggaaattgcagttaagttctttggcatctcatttttcctcagcacatcaatgtgctgtagagctaaaagtctatgcaatctttaatctgtcttaaatccggttccctaaatacgcagcaagcattggtagcattacgttttcagagataatgcttaaagccagtatttgtaatagatacgtttacttattcagattctatttttcatacatctttatagaggcacccttaaataatttgcaaagaatttgtttttcaagccccaggataaaggaagccagaaaatttaatgggaatgacatgtaaatattagagaggtgaagaagactcgatacattwtcttggaaatttaaaaadgtacctataatttgctccacattaaaaagtaagacacttaaaccagagtcatcttaacatcctttccaaattccatttctttctttagaacacagttataagaaatcttacctcaatgtaagatctactttatttaaattttaagdcaaaacagtccaataacagtttgagacttggaaatcaatgtgcagaaactactgtaatctctcgttggccagtgttttaagtatttgaagatggttattctattttgtgtttggtttagttgatccccctctttgtatttattggaactggagctactggagcaacactgtatctcttgcgtctggcattgttcaatccagatgtttggtaagtacttaaaaatgtttaaaactttgatagctgatcaaggcagtttaggagccacagtctctgtagggcgataacattagggtagtagaaagaatgttacatttacagtcatacaataagttcagatctcaaatctgctgttttcatttacttttttyggttcatgaaattatctaatttctctgagtctcgttttctctttggtaaagtagaactgctaataccaaatcttgtaatgttttgaggattgacataaaaataattgtttttataaaataatcatggttctcggcacatgtaaatgttttttgccttcacttgcacatttgcagttgaaaaacaatagacaatcaaaagattgattcatcattattctatgcacttttctgtatatcactttattaattaaatggaaaggttttgtgaaagccagataaaaagtatcttgtgatagggattctgtgttctaccttttttctaattgattacatgagattgcttattatagatcctctacctgtttcaacttcataatgaaataacaccatacctcatctaatagaaaataagattgatctgttcaaaaatgtattcttagtacaaaacactaaatagtgctttattattataacagtcgtaatgttttatttcttttagttgggacagaaataacccagagccctggaacaaactgggtcccaatgatcaatacaaggtaaactacaaaattgttttaaagttgttagaaattgtgttgtaataagttttgtcatggggtgggttttcttgaaactggatatacgagtaaaattccattatattgaactttaaagagctgttaggtagttctgtgaaatgaaaatggtatattgctctaataaatattttttgctaggtatttaattgctagtataagaaaagaaggaaaaatagtatagctatcatttaccattttcttagttcttaggtagtctaacacagtgttctcaaacttcattatacatagagcttgttgaaacacagattcttcagccttatccccagagattctgattcagctggtcttttgtggggcatgagaatttagagtagtctgtggaactactcttcyagagaatgatttcatggactgagaccatttattgattccccaaacataaccttccttatgtgtaaaaaattttgcatacaaagaccctgcacagcatcaaaaccaagggcaggccaggcacggtggcttatgcctgtaatcccagcactttgggaggctgaggcgggcagatcacttgagatcaggagctggaaatcagcctggccaatatggtgaaaccccatctctactaaaaatacaaaaattagctgggcatggtagtaggtacctgtaatcacagctgctcgggaggctgaggcaggagaatcgcttgaacctgggaggtggaggttgcagtgagccaggatcacgccactgcactccaacctgggcaacagaaccagactctgtctaaaaaaaaaaacccaaaaaaccaagggcggcttcattaagataccataccattcacataccatacagttgacgtgtttaaagtttataactcactcaatgcactttccataatatcaagccatttcatcaaaagagagtaactggctgtttgatttatcactctgaagaacagggtccccgatcagtgtgtgtccagcactgcttgacaggtgtacatctatgatggattattactcatagcaacgttttkttgttgttgttgttggagacagagtctcactctgtcgcccaggctggagtgcagtgccattatcttggctcactrcagcctccacttcccaggctcaagtgattctcttgcctcactctcctgagtagctggaactatggcacgcacaaccacacccagctgattttttgtrtttttagtagagatggggttttgccrtgttggccaggctggtcttgaacccctggcttcaagttgatccgtctgtctcaaccccccagtgctggtattacagacgtgagccactgtgcccgcagcctgatagcaacttttaacatcaccctttgtggatttcacgttttccccttaacctgattataatttggcytctaaatccttcagtaaatctccttacaagaagaaaataaaaatgcaatggctaagctgaaacatcgatctcatctgtgttatattttgcctctaaaaagataaacgggcatcctgatttgtttttatgtcttatgacattgtttatgaatttgtttaaactaagtccattccagagaaaataattccacatacaagaaacttttaaaaagtaaacaaacaaacaaaaaaactagcaggctttgattcttccaccaaagagcgtattggaatctatgggtatgtgtagttcaaaaagtgtaacagatgattccgataatgcagccagtctactaatgttctgaaatatcacaacacatgccaatatgaggccttgggaaccgaaaatgaaatgttgctgtaacaacatagctgttaatagctatgacactgatagcagagtctggaaagatgaagagtgtcatgttatgaaatgacagaaatgaaaaggaaccaaatccagaaacttgagaagctggagtaaatgaaacctacttaatactttttctaaacccattcaggtagactagattattatctccatcattcacaatctctcacctaagagaatatgtttttctggcccactgacatcagatttgatttgtgacttgctgtgggaaattatgagttggaggaaatgatacctgccactcttggaccattatgtggtccctccgttcttttgcttctctcatgagaccaaaattgacaagtaagggctacttattcaccttagaattggaatgaaacaaatatggagcaatcagcatacagatggcatataatgtgagtgaaaagtgaacttttgtcgttgtaagccgctaagatttgaatgtgttaatttgggctgccgtaacaagatactgtagaccaggtggcttaaacaacaaatttattcctcagtccggaggctgggaagtccagatcaaggtgccaaccaattctgttcctcatgagggcccaatccagttgtgtcctcacaatatggaaggagaggagtgagccctcctgtaaaggcactagttagagtgttccaccctcatgacctaattacctctcaaaggcccagcctccaaataccatcaccattggygtttgaggttacaacatgaattttgggaggacataaacattcagtccgtagcagaggattatttgttgccatgctataatctagcaaaagctatgaataaaacagcaagagacaggaccaaaataagatttgagcattaaaggcccagcaatacttctcaactgartaacagttgaagctccccaaagctaagatcagaatatgttgtgccttcccaactattgtttcagagactctaaaagtagccagcattaaactgagaaaaagaatagaggtagggaagttgaaagcaggttttaaaattctagagagaattttggatatgaagcaagtaaatcaggagcctgcttagttttaagaaaattggcaacaatgccatgaatgtgcttttgactctgcgtgggtgtagggccttgatcctgcaaatcgtagaacttgatctcaattacctcttttataaattaagaatcagaagggttattgtgatgattaactaagatatacataaagcatctagcccggtgcctgggcaggagcccaacaagtgtttattttcctgtccttaatatatacctgcagacccttctgtaaattatttctgatattttgttaatatgttagaggatagcacaagtagtttctttttctttttttaaccttattgtctaggttaattgtttcttaaaagaacactgtcagaacaaagaatactgctttatggattatttataattttctgtccataaaagtctgtatctgtctgtatctcaacgataacttggtaataagctttacaacctgaggattttttttgtcagtaaaatacttaagagtttttcagaaataaataagttcgggtatatttgaagaaataaaaggggtttgaagaaagaatgaatatagatttgtgaacttcatgcttaaaaaccctgaagaaaatgtttatcattctgaaattgtggttcttttggagataaataacatagtcttcaagtaattatagcacaacctctttagcattctttggcacaagaatgagtaaacccaagattttagccttatttgggcttgtgtacaagcattaatatgtccttagtagaaactctggaccagtttcaaatatgtcatttttttttaagttactgagagagggagtttttttttttttttttttaaagcaatcacagtaagatttatttctaaaaattaatattaattgattataaagaaatgttggaaatgtaaacagcaaaaataccgtattatttaaaagccattaccagagttgaagtgtcagtttgatattgaatatagtctggattaggaaattagtgagagagagaaaatatcttagaagttatgtaaaccacaaaacaaagcagtaccttatattactagcctctttttgttgcaggatctctccctctaaattayagcagttcattcagcaagtagggaaggtaattcttgttaatcctctattctgttggcgattcttccacgtacttagtagagttaaggcaaaaacttaccgaattggaagtatgtatcagaaggaattcttaattattcactttgaaataaaagaattttccttataggttccaagtagtagactgtactataatactgctcttctgaaataaattgaatatttttaccttgccaaaactatcattgaaggctggaattttaggtacagtatttttctgtgaatgattttatgttgttaaatattcttttaaaaattcatatctgtaattgttactgtagaaaaccaaatacaaagaattctaaaacctttgtaccgtctctrtgtatttgagattacttaaaatatctttttttctgttccaagttctactcagtgaatgtggattacagcaagctgaagaaggaacgtccagatttctaaatgaaatgtttcactataacgctgctttagaatgaaggtcttccagaagccacatccgcacaattttccacttaaccaggaaatatttctcctctaaatgcatgaaatcatgttggagatctctattgyaatctctattggagattacaatgattaaatcaataaataactgaaacttgatatgtgtcacttttttatgctgaaagtatgctctgaactttagagtataggaaattaactattagaatttaaagaatttcttgaatttctgtagtttgaaaatacgactttaagctgctttagtaaaacacttccattttgtgtatagactgttggtaacttcactagagcatacataacaactggaactggaaattatacaaaagtaaattgggaaggatactccagcatctgacactggcaaaatggaaacctttgagtttctcttactggctgttgaagtgtgtgcagtttttaacaatggtttttacttggcatctctttgttgtgattttcaaggttataagttgctttggtcctaggattgaagttgaaatctgagtttatcagtgctaaccatggtgctagtrgtcaagagatcttgagaattttggctgctgagtsttggtgcagggtgcaggttttcttttcttttttcttttttttttttttgagatagtctctgtcacccaggctggagtgcagtggtacaaacatggatcactgcagcctctacctcccgggcttaagtgatcctcctgcctcagcccctaagtagccgggactacaggtatgtgccaccatgcccagttaatttttgtaattttttttagagacagggttttgccatgttgcccaggctggtctcaaactcttgagctcaagcgatccattctcctcagcctcccagggtgctgggattacaggcgtgagccattgcgcttagccatggtgcaggttttcaaaggccaggaagtatattcataattttaagatggggaatatagcaagttttcacataggtgtgtgtaagtcatcacatcatagaaacttgaggaattcagtgacattaattttggattttcatacgtaagtatacaattaaatgtttacagggtagtagaagcacattttaaatgtcaggaactgaactaagtatttgaattacgtggattatctcaaaaattttgaaattgttaaacgagttgaattacttgaattcattctgttagtcaaatggtggatatttacacccatgtagttttgaatttagagtgtgtagagtgttttcagttaccagactccatgcttttacctcctatgtgtcaggtataatttgaacctctaagaacagggtttctcaaccttgccactgttgactatttctgaaagacagtttggtttagcagaccatcccatgcgctttagcttgtttagtagctaacttgggctctgccactacagacaaaaagcactctttccctccaattcccacaggctatgagaagaatggagacattaccaaatgtccattggtgggcaaaattgctccattcctacctctgttgagaattactctagatcctttggcacaaattacctcaaagtttaaaattgtgtaaacaaacagtgtgtcatgtaattgaaaaacattaagcaactccaaataaatgctacattaagaaattagtaataacgttttctagaattgaggatcattttatgcatccttaaaaattctttgagtagtatctttctactttgtgtctatccttggactttgcaatgtaagaatacatatgaagtttggcatgaaataggatatgtcttaatgaagaaactattactgctatttaagaaacttcaatggcaatctaaagaaattgtcatttacaaatgcatcagataccaatgctgccacgaaagataacacactttttttctttgaatgtttagaattgtgcttgtgcttttttttttttttttttttttttttttgagactgagtcttgttctgtcacccaggctggagtgccgtggcgtgatcttggctcactgctcactgcaacctctgcctcctgagttcaagctattctgcctcagcctcctgaatagctgggattacaggtgcccaccacaatgcctggctaatttttgtatttttggtagacagtttcgccatgttggccaggctggtctcaaactgccgaccacaggcgatccgcctgccttggcctctccaagtgttgggattacaggcgagagtcactactcctggccctactatgcttcattcagaaaacagactgctgcctttgtttctcatgttaatgaagtctgcaggcaaagctgcatttaaatacagatatccttgggtagtatttacatgtatttaaaaatttgcagttttcataatttatatatgcttcccagtaggtacttgtcttactctgttgctataaatgaatacctgaaactgcgtaatttatacattaaaaaaagggttattttgctcgtgattctgttggctggaagattggacatctggtgaaagcctcaggctgcttccactcatgatagaaggcgaagggtagctggtgtgtgcagagatcacatagacaagaagcaagagagaagggggaagtggtaggttctttttaatgaccagctcttttgggagcaaatagagtgagaactcactcattactgagaggactacatgaaaccattcatgaggaatctgttttattacccaaacacctcccattaagcaccacctccaacattagggatcaaatttctttttcctttttttttaatccgcttttagacactgagtcctgctatgttgcccaggctgtagtgcagtggctattcaaaggcacaaacagtgcactgcagcctcctggcctcaagtaatcctccccgttgagccttcctagtagctgggattacagacatgcctctgtgcccagtggggattaaatttcatgaggtttgcgggggacatacattcaaactagagcagttcccccccaaaaaagctaaaaataattatactaaattttacttctttcaagtttattacccaactctggtcagaytttatcctcaccactccactaaaaacgcttctgttaaggttttatcagtgacctctgtttgtgaattcaagttgatcatcagtatcactttgacctaacagttgatacagctccttgaaacactcttcctgggtccctagaacaccatactgtttttgttaacctacatcactggcttttctagtcagtctcttgctcatgcccctttgtttcctgagctattttctgttccatttatttatttaraaagggtctctctcacccaggctgcagtgcagtggcacattcatggctcactgcagcctccacctcccaggctcaagtcatcctcccacttcagcctcccaggtagctgggactacagatgtgtgccaccacacccagctagttgttaatttttttgtagaggcagcatctcactatgttgcccaagttgatctggaactctcagcctcaagcaatcctcctgccttggcctcccaaagtgttgggattacaggtgtgagccaccacatctggctaaatgagcttttttaggtaaggggattagtatatgtcatggcagaatacatgttacttagttattataaacattggaattcatttatccttttcctttagaaactttaactggaatttttttttttttttttttttttttttgagatggagtcttgctctgttgccaggctggagtgcagtggcaccatctcggctcactgcaacctctgtctcccgggttcaagcaattctcctgcctcagcctcccgagtagctgggactacaggtgcatgccaccacactgggctaattttttgtatttttggtagagacgagttttcaccatattggccaggatggtctcagtctcttcacgtcgtgatcttcctgccttgacctcctgaagtacygggattacaggcgtgagccaccatgcctggcggggaaaattctaaaagccatattatataaaacttggaaagaaaaggactatttggtaaaagcttattcagctgttaacaatctgattaaataatctttttattgcaaatatcattgatttcaacacatgaacaaggtgactggcttttacaccagagctgtaagtcttaagaagtgggatgattttatttctccctaggtttgctaaagcaatgcctgtccacatagcgtgccataatgttctaccctctctgatttgcaytgtgactcaatgaattaaaatcttgatatgcaggtcatctctcctaggttggaaatgatactgagttaaaccatgcctgatgttcaaagaattattttatgctatgtgaatgacaaacagcatctggaaaaatgtatctcaggtctcttcccctgctgttgtttttaaatcgtaaaatgcagcagcttgtatactctataataacctttttctgtttgttcctaagcagaaaaagaaaggaattaattctacaagattttcagacctccatcctaagtgaagatacattgcaagcttctttttaaaactttgctaaagagtcatttaatcttccctgttatatgcagacagtcccaacttatgttagctcttcttatgattttttgacattacaatggtgcaaaagtgatatgcatattatgacatgatcatttattgaataaattacatgagatattcaacactttattataaaatatgcttctatattttataatatagatgtgttagatgattttgcccaactgtaggttaatgtaattgttctgaaaatgtttttaggctcaactatgatgtttggtaggttagatgtattaaatgcattttctttttttttaatttcctttttttaaaaaaaatttctttttaattctcagcaaggcaaggtacttctacagaagagtgtgcccttacagatggagcaatggtgagcgcacacttggacaagggagtgggagcggttcttatccctgaggcacatggaccctgctgctgtgtcgttcccctactggctagggttagaccacacaggctaaactaattccgattggctaacttaaagagagtgatggggtgagtggtttggcaggaaaaatggttatgcagggtggagaatgagttagggtggggcaggtagcaggtaatcagaatgagggtggaacaggtaattagaatgaaccagggtggagcaggtaatcaaaaaagttgctttatgaggaagttaagtttaaaactagaaggcaaagaattgaacatactgacatattgattctttgaaaagaatttagaactcatatctaacaacccttcctcttgcattttcttacagctctttcttttcaaacttttttttaacatgtcttggcttagttgttttgcttgattttccaaaagaagaagcyctggataaggcggaggatagctgagggaggttttagtagctgccatttttatgagcctctgcaccaacccacagatgcatggtgtgacacagcacctgacaagaataagtacacccattacagctatgaggggagtaagaattgaggctattattcttttycatttattgaaccacttttctagcctgtaaaggggtcatttacccctgagttgttggttaactcattggacagagcagtcagaccttccaatgtctttgttatacttccatcaggggtggcggtgtttgggatgaaggtacaacattgagttttaatcatgatgcaaacatctcctctttctgctaatatcatgtctaaggctgtcctattttcccaagccatctggcttgtagcccctaattgctcagctattcctttaacagcatctctagtgtagttaataaatcactgttggttgtagtagatgcagtttatccatttacatttttattaattgtcayccaccaaaatattgactcaaatcctgcagctatttgattttgggctttaaattgacctggtattccccktgggactctaattgtgtctaaatagacgtgagagtcgagagacccttaaggggcttctcttgccttatgatgtcttatttttctttcctctggttgatgaaatgccagggtgaaagggatggccagctggactaaagcacaagtgccactccagttatttggcagagtgtccagtaaaggtccaccacaataccaccagacatccactcagggatgaacaagggctgactgattgataagctcttgaaaattcttaagctcactgcatcccttcaggtctccaaggaacgctaagtttcctccytgttgtgagagacacaaagtgaactgagtgttgggagacagaagctggatgaccctcaggggctgacccacagggtgctggactttgggatatagcagagagagagcttggcacaacttgttactccaggccgtagaatcctggaaatccacatgtgatcgactggaggaccaccctggtggaaaggggacagtctgggcctctggcctgctgtgcacacaagcataacaattgcttttgtttaacgtgtggatggaatatttgatccattccaaccaggcatttgaatcttggtatcctgtcttaattgccaaagtttgttttaagtctttaacttctacgatcctctagggaaatgaatgtatggttttaggaaattacaaaaactggttggggcagtccatccttgcccactgattgctggaccaactacagcataaaagctctacatcgggggggcaagactcctggttgacactggagtctttatcgaaatctccccagattaaatggtcccaatttactaaggcccagtctgaggagagtcaggagggacagcggtacttttmtgaagtagagagctgtctttgacttggcaagtccccacagggtataacaaggcaagcatcaaatgtaatagtttgaggagaaattgacttggttatgttataactagatggtcagcaatagagcgagggaagaagaaagagtaatagaatagatgaaagagagttaaatttttcttagctttagtttggtagggttttccccagggaccatggcccacgactctggagggggtggcgctttcttgactcaggtgtgatgagtccatcccctttccactgtacaaacagtagtcttggtggttagcagcacaaggtagggtccttcccaggctggctcgagttttccttctttccatcctttgatgagaacgtgatcctcaggctggtgctcgtttaccggaaattctaggggtggtacatgtgctaaaagacttttagttttgagggaaaggaaagtggaagataaaccaagtatataatttctaagaaattgatmttttgttttaaatgtggggacatcagcagtggactttatagttcttggtgccttcttactgagaaatttcctttagcacctatttttrttagtttttagaccaaagaaagccaaacaccattttatatttcacaatgcttcctgtatgatttttataccagataagctaaatgtcacctttatattagtgtggtttattttattttattttttattttttgagacggagtcttgctctgtcgcccaggctggagtgcagtggcgctatcttggctcactgcaagctccgcctcccaggttcacgccattctcctgcctcagcctcccgagtagctgggactacaggcgcccgccactacgcctggctaattttttgtatttttagtagagacggggtttcaccgtgttagctgggatggtctcgatctcctgacctcatgatccacccacctcagcctcccaaagtgctgggattacaggggtgagtcactgcgcccggccatattagtgtgttattaatattaaactcaattttaataaaaccttatagacatatttatccaattttaacgtctgaccataaggtaagatttttatagactctttttaactttttataatttttgttaaaaagcaggttagtgctttaagaaaaacccgttatgcttttattttaatgtccagttcacagaaaaactggatgataccctaacttaaagcaatatgtttacacagagaatttcctttataattaacatttcaaaacttgcttaaaccttcaaaacaaaaaaaatttttttaaccctttaatgtaggtaaaaatccatacattcttatgcctccttataatccttttaccaaaagtatattttactttccttatacactttgcacataaactgtttcttcaatagttttacattctggaggcctgattacttttaaattatacaacatttcttgcataaattcccttttataacacactttttttttcatgactttcacagacaattctttgacaggcctcaactttctgacttgttgcgaacatccctttctttaaacaaccagttactttacttcaggacaagaatttaccatataacattctttttacataaattctccctacccccactttttttttttcaaagatgataaccattcttttccaaaacaaacttccttcatgtctgcggtctagagtgtctaaggccacaagattagaggttaggataatacatgttacactgttaacttttagcaaacttyacttttgttgaaaaccttgtaagtttgggatttcaattatcgtttgctattaataagaccttgtttagtccaacttaacttagaattggtatagatggttccttcctggttctgtaaatactttaaggcttggctaagtgcagacatcctccaggaacctccaggtattcagttatccagaagctccctgaaaccagtcctctgagaccttttatggagacttcatttgataggcatgattgacaaccatgtagaaatgtgattggacaaaaaagatatgatctaatattaatgggctgagtggggaaacccagcaagtcctgtctgttcacattcttactggcttctctgtgcagctttccttccttcaggggatggggcataaccccttctgaaatgagggtcttatgacctgcgatcagattagagtcctgccttgagctggtgaaagaagggccagggaagttaagagagagagagtttctgttttctgaggcctgcttctgaggcttaaagtgccccaacgtcataacaaaggactgtaacaagggctatgggaattattagccaggaacaatggacaaaaaccaatgtgtgtacatgccataatatcacagctttaagacttttcacaaatatgaaaaaatgagtttatttttatttttatttttatttttattttggagtccatgtctcactctgttgcccaggctggagtgcagtggcataatcatagctcactgcagcctcaactcaagtgatcctcctaactcagcctcccaagtagctgggactacagcaattttttaaattatttatttatttatttttgtagatacagaggtcttactatgttgactaggttttgtcttgaactcttggcctgaaacgatcctccaggtgtggcctcccaaagtgctggaattgtaggtatgagccaccacacctatcccctcaaaagatggtttaagatttttgcacaaataagaaagctgctgttttttaataaatttttatttttaaagtttttactttttttttttttttaactcaactgacataatgtgctgagttttgtgctgggcacaggaatacaaagatgagagccactttaagaacttacagttaagttgggaaaataaacaatgatctttcatagtgataagttcaaagcagtagttaaaagccacagttcagaggaaggattttttgtttaactggtgtgtgtgtgtgtgtatgtgtgtgtgtgtttctgtgtgtgtagagtgatagagttgttgggcaggaaaattttccctgagcaaatgacaggtaaatttggctttgaagaagcaaatctgccagaaagatgagggctagactgggacaacatcagatgttgaatttatgggccccagtgcaaaatggcaacttggagtaccttgtaatattaagaattacaagacagtgacagcacaacattaaaccaagtttggggtcttgcaaacacaagagcctacacgcaaatctcatgccgatcaagttggccctggttaagggtaagaaattccagaccgaagaagtagtctatacaaaagcatagaggcatgtgtttggggtcttgttagattatggtgtgtgtatatgggtatatcgtggacacaggtttgcaggtgctactatggagaagggcaacacaacaaaagagttagtatggtgggtttgtattgtgtcaatttagttaagcaggtactggctttctgaggattccctattctgcatattcaggaatactgtgggccacaagaggtatttcacatgagatttgaaaaaaaaaaagaaatgtgacagcaaccrtgatctgtttaaacttggaaggtctgtggagggcaccaggaaaatttttcctgagacagatgagtttggctttgaagaaagccacagataatccacgttgttccttatctcctagtttaccttgtggcctggggcagcagcagccccgtagctccttcatctcctttcagccctctttcttaagcttctcaagcttcccgtaacagagtgcaccagcttctcctgcagatcacctacacatcccatcacattttgaagcttgaaggtattgagagtcccacacaggttcaccttcatccttgtgcgttctggtttgtcttctcaggttccactttgtcctttttctactcaacttcacatttatttcttcttttctgtttaagctgttttgaccttttttctgttttaattttttaaaaaattctatatatttgtggagtacaagtgcaattttgctgcattgatacattgcattatggtgaagtcagggccctcagtgcatccatcactggagcagtgcacattgtacccaccgatcaacctcccatcatctaccccttctccacctaccacccccgtgagtctccactgtctattattccacactctgcttctgtgtgtacacgttatttagctcccataagattaaaaagttttggccaggaactagagtaattttcttaatcaaaaagtaaaaatcatgtagaaaaaaggacatggggtttggaatcatatactttggtttgagtccctgtacagtcactcattaggtgtttgtccctggcagtgtcttactcagagctctctagaacacagagcctaagacaaagtcttgcaggcatggtagttcatttgggatcaggagtggtgaagaggagtggtgaaacaaggaagaaagacaagccagcacaaagatggtttgttgtgttgtccatcacaatgggtgactggggtttcgtgttgtaagacttctgagaaaccttatgaaatgcatcacagaactctctgcctaaagaatgaaggggatgggaatctttatcttttggctcctgtcttccattggtcaaggatggtgtcacaggcattaattcccctggacttgggagttgtacatgtatgagtgccaagtgcatcacagagtcagagaagtgaggggtgcttagcacctgcccaaggtgagatgcacaagatgctgtcaggttgcacttgcatgaagctggttgaagcctgcctagaactggttgctgtagcagtggctggaataagagatgaagctgagagaatttgaagtggcatgctagaggtatctgatataaccattttacacagttttgagactcactctacatctgtacaatgatatctgtctcacggatttgtggtggcaatattgagtaaattaatatatgcaaaacttgaaagagttgcctttattttctcttcttcctcactactcatgtggcttatgtctccatcaccctgctgatactgccctccctgaggtcgttattgatctccttattgctaaatcgaatggtcattactaattttttggatcctgtcttatgtaatgtctccactgcatttggtactatagagctctcttttttttttcctcaaaggtgcttgtcctggattctgtggcactttgttccttgtttttccattgtcctgggggacacactcattttctattttgccttgcatggtcactcaataattgttttctgatagaattaataaatgacaaaaagcacataaaagtgagtaatcagtgaatgatttttccttcatsttttccttaatttcactggtctatattatgagtatgtgggtgtatgtgtgtgttttctgatattataacataagactggccatgttttgccacaccaattgtccaatttattcttagtttaactcacaaatactgtctttctgtgagaaaacagattgtttcctataatttcaacctccaagaattccaaatttttcttacatcctgttgcaaatctgtaatcttgaaatttccttaagcattctaaaatatgttaataagatattattctaatatatttgctagatattcaatctcagctaaaattgccattttaaaagatatgatacaattcttgcatacgtatttcataaataaaaaaatttctatcaaaaaaaggtacatctgaataagcatgctgccatgttaggcataatcaactgatacatcagaccattcggattagaagtagtacttaggcagaaagacacaaatcttgggacatctggccagaggagagaggaaaatgattgctactctcaactcagaaatttcacaagtgttgtgaaaacatagaaggggtggcagggagaggggaatatataaagtgggtaatattttatgaatttattctttgcttttatggggggagtgctttatctatttgtagttctgtttctattttaacatctggagtgtgacttccagacaatctacaaactcctttttcccttgcacctcccacaacacatggccatggatttactgtttatgatgtctccaaaaacgttacgtgtaaatcctatttccctggccaggcgtggtggctcatgcctgtaatcccaacactttgggaggctgaggggggtggatttcttggagtgcaggagtttgagaccagcctggccaacaaagtgaaaccccatctctacaaaaaatacaaaaattaaccaggcgtggtggtgcttgcctgtagtcttagctactctgtaggctgaggtggaaagatcacctgagcccgggaagtcgaggttgcagtgatccaggattgtgccactgcactccagcctggatgacagagtgagaccctgtcttaaaaaaaaaaaaattcctatttctctattacacacatcttgagtgcagcacttaggttttctatatatacatgtagacaaggtctgtttctattttgcttatcactgtatcaccagggcctgacagtacctggtatgtaataggcctacaagtattcagtgattgagtatattgaacataaagcaattgcagaggctttgatatatagacattttctcagtgatagtataatttaatttgtagttggtaactgaattttgaatgaatgtttagaagtggaaactgaagtayttataggttattaaaatgaaaataaaatgtagtaaactgttattttataagcacctaagggatcatatatataacagcaataaaatagctgttgaagaaaccctaattactgataattgtttaccatgtagacaccttatgtgatgtttctagatggaagctattaatttgaattactctagaaaaaatgatatatataggcatttatactttatcattataatgtggcaatatacaccctctttttttttttaactagaatcccacagtgcctaacagtcatgactaaatttatagacttgtttttcataatgaagcaaaataactatgagcatgaaatgtcctcttcttttagtttcattactgcaggcaaataaaacaaagaacctagtggatagggagaataagttatgccatggagaaataagaaatagatgcctattattaattttcagattcagaaacaagtaaacaaaatggatcatattatcagcttgtattggtacaaaaaaatgattgtaattctagttttgtgctcaagtttcaaataagtataattttgagttcaaataaatgtttccaggaaaaggaaatgagtatggtatttgctggtatatcaatatgtagacatgatcacagatcataaacaagtgcaggaaatacagtgcaatttatttattagaatgcagtgagaatttgttcaccagaaagaaaacagaagcacattttagctaatttatattgcttcttaaaagcacacaccgaatgaaagattgtattaggaaagaaatgcttagaaagcaaagaacatggggaaacattgaataatcagattgctagggataaaaaaggaagcttaaggaattagaaggattaattttgctcttgcttctgtaatgaatagggagggggagagaaaggacttgtgtttaaatgtgcaagtctatttacaggggttatctcactttttatcctcccatcagtcctattgaacttctattttttccccattttcatataagaaaaataaggttcaggaaggcaaacagaataaatttttcaaagtcatgctattagctttaagagcaagtatttgaatccaagtctacatagcttcccaaattaattcttttcccactatattatgcctcttctctggcaagctcctctctacttgtagcaatgcttgttggggcagaccacaaaaaagtgtcaattattttgagtcccaaagtcattggcaaaataatctagctttacaaatctgcaaccagatgggagtggcttagcgtgccttaactgtagcttgctttgttctttgcttttgggttatttttattcatctttaacagttgagaaagttagagttaagtaaattacctatggttacagagaccagaaattactgaactaggatttgaaaccatcaggcagggtaactccagagcacaaacacttaaccactgtgctaaaatgccagtcctcatagaggaggaaatgtaatctttcctcgctaccaaagatttcattatcttctggtgatttacgttgcttgtggaaaagtggctggggaggtatatatgtgaatgggcacggagggagtggagaggaaagggaactcaaacgcagttacttcattaccttggtgattggtttatggctcacatctgctttctgcatatgttgtgggaagtgggaaaacaaaaggtatataatggtaaatagggatacaaggtttataaggtacacagtttgtaacataggatatgtaatctgatggcaagagataagactgaaagtatgtgttgaggacagatcaagaaaggaatgaaagataagattggattttgggattttatgtgggagctgaagaggaatatttataatggacacaatcagagatttgcttttgggagattcatctggcatagttgtacatrgtgaattgcacagaagagacacaggagttaggaagtccaactgaaaggccatttaaaaaataacttatattacrtgtatttattagggaaacattaattgttaaaagaaataaatcttcctgtgttagttagcttgggttggcataacaaaatacatagactgggtgacttaaacaacagaaatttattttctcacagttctggaggctggaatccaagattaagttcagtttctggtgagggctcttttcctggcttgcagatggccaccttctctatgtgttatcacatgacagagagagatagagatagagagagaactctctggtgttcctttttacaagggcactcatcccagcatgagggacgcaccctcatgactccatcttaccctaattaccccccaaatgctccatcttaattgccacaactttggggggtagggmttcaacatatgaattttgggggaattcattcagtccataatacccccaaatctccatggtttaacacaatagaatttagtgaagttcaaaacaggtgtttttgattggcagaaagctttcaataggggattcttcaggcaactttctgtggtgtggttctaccctcttgtagggcttagaattctgtccattaatttggcaattcattaaagagaatggaagatcatgcataggaggtgtttcttgttgttgttggttttttttgtgtgtgtttttctttttgtttttttgagacacagtctcgctctgtcacccaggctggagtgcaatagtgttatctcagcacactgcaacctccgcctcccaggttcaagctattctcctgccgagtagctgggattgcaggcacccgtcaccatgcctggctaatttttgtatttttagtagatatgggatttcgccatgttggccaggctggtctcaaactcctgacctcagatgatccacctgcctcagcctcccaaagtgctgggattacaggcatgagccacctcgcccagcctccctacatgggaggttttatagaccatgtctgaaattggttcattcatatcacttctgtcataccccttagatgataactcattcatatgtctaaagctgactgcaagggagactggaatatgttctttagttgtatcagtcaagttggctaggttatgctacagtaaaaagcaacaacaaaacttcactggcttcagtaacagaattttatctatagggagtgatgtgcagtaatttctaagtttggtctagataaagttcctcttgatccagagacttaagaactatagtaaaagctgtttacatcccataaactcaatatacaggggtatgagagggacaggataaccataataaacattcccatttagaaagaggaaaaatgggaccacacagtagtccctggtccatgaaatctctccatgtgataagcagattccctaccttaggcatagcttaatgttccttgattaggtcaatctgctttccaggaggtgccacccagttctttgttctctgtggctctcaggtctctttttttttttttccttagtttttattttaaattcgggggtacaagtacaggtttgttacataggtacacttgtgttatgggggttttttgtacagattatttcatcactcaggtattgcctagtacccattagttatttttcctgatcctctccctcttcctaccctccacttcccagtgtctgttgtttccctctatgtgttcatgtgttctcatcatttaacttccacttataaatgaggacatgcagcatttggttttctgttcctgtgttagtttgctaaggatattggcttccagctccatccatgtccctgcaaaggatatgatctcgttctcttttatggctgcatagtattctatggtgtatatgtaccacattttctttatccagtctatcatttatgtgcatttaggttgattccatgtctttgctattgtgaattatgctgcaatgaacatacacatacacgtctttttttttttttttttttttttttttgaggcagggtcttgctctgtcacccaggctggagtgcagtggcacaatctcggctcactgcaatctccgtctcctgggttcaagagattcttgtgcctcaacctcctaagtaactgagattacaggtgtgtgccaccatgccagactaatttttgtatttttagtagatgtgttttcaccacgttggccaggctgatcttgaactcacggcctcaaatgatctgctggcctcatgtgattcacctgccttggcctcccaaaatgctgggattacaggtgtgagtcaccgcacctagcccatacatgtgtctgtataatagaatgatttatactcctttaggtatatacccagtggattgatgggtcgaatggtatttctgtctttaggtcttggaggaattgccagactgtcttccacaatggctgaagtaatttacactcctaccaacagtgtataactgttcctttttctccacaacctcgtcagcaacaaaggtctaatatcaagtgtctataaggaacttaaacaaatttacaaggagaaaaatcccataaaaaagtgggcaaaggacacgaacagacacttttcaaaagaagacataagtgtggccaacagtcacaggaaaaaaagttcaacrtcattgaccattagaggtcttcctctttaaagatttttctggccaggcaaatcccagaagttttggaggccaaggtgagaggattgcttgagcccaggatttcgagaccagcctggacaatgaagtgagaccctgtctctacaaaaaaaatttaaatattagccagacatggtggcacatgcctgtagtcccagatacttgggaagctaaggcaggaggatatcttgagcctaggtggtcaaggctgcagtgagctgtgttcatgccacagcaatccagcctgggtgacacagtgagactctgtctcaaaaaaaaaaattcttccttactattattcttcctgatttcatctaaaattgacattggagaacatgcccttcttggagtctgaatagttttttttttaacctgcttgctgttcaaagaaggtggaggtcaagggtcagtctaagtttcaaataatcacagatatttctagtcttgtttcataatttatttgacagaaaaatgctcttgtaagcttaatagaattttaatcagattccagttatttccatgtgtcaatgacatactcacagttcttttgaagcatacttagatgtattatatatcttttctttctcatccatatgtgctttttctccatctctctattactctatcactctcatcattctctctttgtgtcttaacttaattggagtaccttggatttatcggacttcaggggcaaaagcacacctttaatttattttccttgagtcagggaaaattatttacaactcttaggttcgatctctcttccaaaggctgagtttcaatcattctttcttactcaaagatcttttctgttttacctttcacaacttgtatttgaagagagttacttcttctgaccctacaaattactgaatttgtgcgttctctctaaattgtatattcctacttattaccagccgattatttccatgagcttttcattttttgtaatacctcattgaatatagtcagctgcaaccaacacactgctaaacttctctgttctaccttttcccttaaggccacaagttcagtaggtatatcatctttcagttatttcagttggcaacattatcaaagttttgccatgggatagtattgaaaaaccatgttttcaacctctgaaaagacttcctcatcacctgctgcctggacctaatgccacatgtattaggttttgttgttatggcagcacctgtccagttagtacctatttatgcatttcttaagggaggtcagattatgatatagaatcaaaaactaccagatctcagtggttcactcaaccaaaatttatttttctttgatgctacatgcttagtgtgggttgagtgagagtttctcttcatattcactctggaatcaaggctattgtaaatttcatctaaataccttttccagaatcacagagtaaataaataattccagtttgcttggatctttcccaggtttactcttgaaaaccctgtatcctggaaacccccattagttccaatcaaaccagggcagttttttctggaactgttttggttttaaaacaaaaagtcctgtgtcccaggaactctctctgtcctgcccccacaccgtcactgcagcagtgggaaggaaatttgactcttaaggcatctgcccaataatggcaactgctacttcctctttctttcattggccagtgcaagttatatggctatgcctaaaatcaaagtgccgagaaagagcaactgaccctatgtctgtaagtcagagagtcataaatatttaatgaacaccacaaaagactgacacactagctctatgcctaagaagacaaactggttttataagcagctggtcagacttttcatttataaaagatattgtgggggcttaaggtactaaaatatagaaaaagttgaacaaacaaaatcaatataaaaattataaaagtagatgtttggaaagagatccagaaaataaatcagatccaaaggataacaggatctgcctttgaactatacatttaacaacaaatgccttcttggttttagtgagtatatatatgtatctagatgtgcatgtggtagtagaggtaatgcgtaagataaagttacttcctgagaatgaaattttgaagaacatataggcaatgaatgcaaattagccacaagtagaaattactgtctctgaacttagtgaatgtgagaatgagctttaagaatttccaagtctgtcagttacagacttggaagggtttgggctcagaatggcattcatttatttattcatctattcatttagtcaatgaatatttattgaatggcaagcactgtgatagagactagggatgtacaatgataagacatgatgtccctgttattcggggagtcagataaacagatagttataggttgtgacaagtactatgaaggagatgtgcaagatgataagatggagtacaacacagagggcaaagaagaggtaggaagacttatgaatttggtcataagggtcattttttgtaaagggagtcatataagctgaaacctaaagggcagaaattagctgccaaagggaaaagctggtggaatagctttatagccacaagtgtcagcaaatgcaaagacgttgcagcttggaagaggaaccaaatgggctgggtgcggtggctcacacctgtaatcctagcactttgggaggttgaggcaggtgaatcacttgagaccaggagtttgagatcagcctggccaacatggtgaaaccttgtctctactgaaaatacgaaaaaaaaaaaaaaaaaaaaagaagaggaaccaaaggaagcccatgtgattagaatgcagcagccacaaggaaaactgcaacaaaaagaagtgggaaaggaagtaggagccaaaccaggataacgagtttgaattttatgctgccaataaaaacctttgtattcaggaagtgatattatctgctcctctatttttcagagaacaacctgattgctgtttggagaatggatgggagaggtcaagagtgaaagcaaggaaactagctaggagcacttttaacactcttgactacacaatgacacttggactagggtgatgtcagtggaggtggagagaagagggtggattttagatataatatgaaactagcagcaataggacttgatgatgaatggaagggagaaagaaagagaaagatcaatgatgatgtaattgcctgattggttctttctgcctgcttcacaaaatcaattcactgagaccatggcattgtagtagagaagagtttaattggcatgcggctggccgcagccatgtgaactagagttttcactcgaataagtctccctgaaggctcagaagttagggttatttttggacaatttggtgggaagggggctagggaatgggtgctgctgattggttgggaatgaaatcataggggtgtggaaaactgtcttcatatgctaagtctacctctgggttgggccacagaatcagttgagtcatgagtcatgaatccaggtgggggtcagtctgaaagcttgaaaaaccaatcttaggttctacaatagtgatgttatctatgggaacaattggggaagtcacaaatcttgtgacttctggccacataactcctgagcagtaaggggttatagaaaatatgactacttcttagcataattcagacacctctcataattttatacttgtggcctttcattagtcctatgaaggcagtttttggtccttgagcaaggaggaagttagttttagggaggaactgttattaaccttgatttcaaggtaaaccccaaactaaatttttcccaaagttagcttggtctacacccaggaatgaccaagcatagcttggaagtcagaaacaagatggagtcaactgtctgatttatcttactgttataattttgcaaaggtgttttccatcactctttagtttctggcttgagcaactgaatgaatggatgtaccatgttactgacctattgaaaacttggaaggaacaagattagcgggaaaatgaagaattctgctcagaggtagttggatatacttgttagatgtccaagtaagcacttggtatgtgggtatggtgccatggaggggctgctgggatggagataaacatttgtgagacatccacatattgatggcatttaagagaaggaggttggttaaggtcgcctagggggagtgtagatacagaatagaagaaggtcctgcacagatctggaaatgctccaacatttagagatttttgttgagaaggaagaacagaaaaggagaccaagaaggtgctgctagagacatagtgttgtgtaatggataccaagtgggaaaccgctttaaggagataaagtggttgacattttggatggaacgaaataaaaggagaaaaaacaaagaaaaaaagaaggtaaagtggcggtgggtaattgtgctattgctgctgaaaagttcaacaagcaaaggacagaaaataaccaccaaaccctgcaacgtgcggattataacaagagctatgtctgtggagtgagttgaggaatgagtggaaaatcaggaaatagagacaatgagtatagataagggtctccagtcataaataaatcatattagatagtaaacagctgtaacataattaaattgcaacttcatatactagagtaaatggaaaatttttaccagttataattatattacttatctctagatgaaaattaattaacagaaggtgacaataaacatagatcctagacaagacccaagtccaggaatctagtactgttggtgcagtgggctcaaaaggagcttgacaaagaacctggagggaaagactgctttcataaccacacaactgactttgttgtgtggtaatgaaataggagaattcttcagattttgtattgtgtgaacaaaaattttctcaagactctccatctctcttcactttgatttcttgcctactgtacaaccttttcactaataattcagtgtcctaaagtaacttgataccagaaagaaaggaaagagtgggaaagagaaacagagaggactttaaatgggaagaggtggtaggaaggctacagacaaacggatttattttggagataagaggctgttgttgggccggtggtagctcatacctgtaatcccagcactttgggaggccaaggtgagaggatgacttaaggccaggagttgaaggccagcacagccctggtgacttagcaagatcccattttacatacatatatatatatwtttaaggagcttctttttctaagatgcatgtaaagattataagatgtaatcagatgcagcaaaatatgtagcaggtgactaagtgtggagttccttcaggatggtgtatttgtcacctagggcagctgtaacagaaaaccacaggcttaaacagcatgatttttcccccctcacagttatagaggctagaagtccaatatcaaggtgtcagcaaacttgcttcctttggggagacctctttcctggcttgcagactgccgccttctccttgtgtcctcacaggacattcattttgtgcatgtggagagagagagaaagagaaagggagatagagatatctctggtgtctcttcctcttcttataaagacmccaatcctaacagattagggctccacccttatgacctcacttaaccataattacctccctaaaggcaatatattgaggaattgagaaacatagtcatattggagttcaggggttcaacatatgaattttgcagggacacaattcagtccataatagatgattttacttgtcttacaaaggcaggatgcatccccaactaattttaggtaataagaaatggaaggactgtgtatcaatttattgtagttgtattacagtcccaagcaaggcagggcatcckgggaatgggaatttgtaaaaatgccagggtaaacaggattgggaattggagtgatagacaaagacaagactgtttgggagcgtgggggtagtgataggaaacagacataattgaaatggttggccattagatttaaactaatgctttcctaacttttttcatgtcatggcaggaaaaggacatagatatgatagtttttgtggcatctggaggcatctatatgggatgtgatgggaaaatttttttaaattattttttaggaatatatactataatatagcaaatattatgtaagatattgaaagggctccattgtctgggggtatatatcctggctcttggtcgtggttgagaaakaattcaggacactgacacacatgaggagtgggttcaggagcagaaagtttaatagaaaaagaaaagagagagaaaaagctttctcatattgagaaagtcggtagcctgagggtcttccgtttgcagcggaatgcagttggttttgtaaagaggcttgaggaggcggtgattgatttacatggggcccaggggactggttttaccaggtgtgccatttacacatcccacgaaaagactggccctcccaccctagtcttttattatgtaaacgtggcctccacgtggctrgtcgccatgatgcctgtacacgtggtgtcatctggaggctgccatgacagctggcacacgtggtgataagaaaaagagggcaggagatgccacattgaatgtacctggcttccaggtacagctgcctgcatttacatataaaagcttccagtttgcatatctatgcctgacttctcaggccgctttctattagagaagaaatggtttggggttgctttttattaaaggaaaattgcgcggagaagtttaaccttctctagctgcctaaaaataatttcttaataactcctgtattaatattaactattgaatttgcatactatcctaaataaaatcttaatttttttttgaggcagagttttgctcttgttgcccaggctggaatgcaatggagcgatctcggctaaccgcaacctccgcctcccgggttcaagcgattctcctgcctcagcctcccgagtagctgggattacaggcatgcaccaccatgcccggctaatttttgtatttttagtagagatggggtttcttcacgttggtcaggctggtctcaaactcctgacctcaggtgatccgcctgccttggcctcccaaattgctgggattacaggtgtgagccaccacgcccggcctaaaatgttttaatgaaaaaaacctgagtttcttttcataagcatacttaattgttgctgttgttgttgttgaggcagagtcttgctctctcacccaggctggggtacagtggtgcgatctcggctcactgcaacctccgcatcctgagttcaagcgattctcctgcctcagccgcccaagtagctgggactacaggtacgtgccaccatgcctggctaatttttgtatttttagtaggatgggggggttcagtatgttggcaagcctgttctcaaactcctgacctcaggtgatccacccaccttggcctcccaaagtgctgggattacaggtgtgagtcactgcgcctggctgcataccatttttaatgccagcattattacttccctaggatgaccatatgcaattccttatcaagacttctaaatgataatacctttaaattctcaacagtcattattgataagaaatgttattcacataagtatgtaataaaaaaattaaaacaaattttataggacaattcaattttagaagagttgaaatcagtttcaaaaactttttaaaaagcagcttttcctttctttccatggacaaatgtaatgttagaatttttttttttccatcaggtgatttcacatataattaagctttttcagaccaagcatttaaatgcatgtgcattgttagaggaatcatcctatagttagcttggtggctaccaaaagggtaaattagccatgaatattaattatttataatgacagattttcgggatgcagcctccagctctgcctgtctgacttcctcacccccagctttctggagtgtgggctgttataacttggctgtgtggaacagaagcttcttcaacagcttcctggctcattgtgtgtaatgggcagtggctgcatgctgacattgattttgtggacatccagatgataaaacacacccttgtctactcttatcattttaagacagaacaggagacagcagatgttactcatcacttcttgtgggcatcaattgggctgccctctgaggagccctagagaaggctgctttctgccagaggtgaccaggtggtgccctggtagatccaggtcccagtgtgccacctccaagattaaagatggcattgtttcarggagctctgcttacgttttataaagaggctagtaatatcagaagtggaataacggttaaagtcagaagagagatgatagtttgtctcttgaagaaccaagaaaaattttgataaaatgagcaggctcattaattcggagcttaaattctgaaaactatctctttttttctttttatcatataaaaacwgtgccatatttatttaggccactagatcattcagctctgtcttctttgaatactgccaccaataaatattttctagggaagcaatttttttcaagcaaggactaaaaccaaatttgctaacttttctggataatctattatggattagtcatctgtgcatttgtgttaatcttcttgaatctactgcaatactgttcttgatagtagcccatatataattttagatagctttattgggaaatgattcttatagcrtatacttcacctacttaaaatgtgcaattcagcggtgtttcacatattcacagatatgtgcaattatcactacagccaactttagaacattttaatcaccatcagggttgcacaagaaagaacaagcaggggcatggaggttaggttttgtagtaatgaaaagatgaggtaattcttggtacccatgagaggatgtgattggcttgtttgaatttcatggagtggcaggaaagtaaaacttactaggttgagggctagctggggtgtagcaggtacagctgataggggaactagccaggtgggaagcctttgctgttagttgggagaacgtaataagagcgaggggtcccgttgttagaactttggaacttaaacttgtctatgaagcttaaacttgtcaaagtagcacatgaaatgttatacctcacaatacgaagggtccagcttcattcttttgcatgtggctgtccagttatctcagaaccattygttgaaaagcctcttcttcccctactggagagacttgccatctttgtcaaaaattggtgaattcactgatgtataggctaatttctagactcttaactctattgcatttacctttatgtctatcattgtttcattacacagtcttgatctgcattgctttgtagtacgtttggaaatcagaaagtatgagtcctcctgctttttttttttttttcagggttgttttggctaaagagccaatattcttttggaggtcatattagaagtgaattgagatcgatgtagaagaagaacatagctattgtagactaaggaagggtttgcttttgcttaataaatgttcctttttaagagaggcaactttaaaaaggaggtaartagaatgagagaggagaatccttccataaggcggaattagccctggataaggtgatagtaaagtgggagatgtctaaataatatagcatttacatccttacatattgaactcaataacagttgagagagtaattagctctactcactaaatatttccagatgcaggtaggattgcactctcctgtaccttgaggtgacttgcactggataacgatatatggacagaagtaatgctagtcacttctacacagaaaatatgagtcagkgcacattttaccgtttgttcttcctcttaccctgaaacatggaaacaggcagatgaactttccttagttggaattcctgagtgaggagaatatagggctaacttcaccccctaactcccacccaagcttactcataatggacatgtagcatgagtaacagaccactgttgttctaagacactgggtttgattgttaccaaatttgttaccaaagcataatcaagtctatccaatagaaaattgataccagaagtagggaacatcataagtctaaaatttgtggcattggcttagggatttgaagatagcctgcaaaaaatggttagtgaagactggaaggatagcaatccatgtattgtgatacaattcttgggggaaatattacatgcaatgacttagaaggagaattatgatccaaatgaatttgtaactcttaggaaagaggttttaagcaaagtattagaaatgtaagctggcttctattgattgcatttggcagggtattacaagacagagacaagctcagaaaagaattagtctacttataagcaaggattaaagggaatggagtaagtccggaaattcagaaatgttcaaatctggacaaggcagctgcttcacaatctcaactagtaaatacaaagtgacaaggccattaaaattcaactgtatgtatgataaggatcaaaccaagtgtttgctcattatatccgttgctaaaactcgtgaatgacttcagggagcattcagtaaatcttttcaattgaacaacgtagcttagcaaaaagagattgaagcagttatcctctagtcttgataggctcatggaatacataattacattagagatgggtgtggtatggtgacaagaaagcggaacaaagaaataacaaaacaaatcaaagaagtgtgtccagaaatgagtgatggctgtggctattggcacatagaaataagtggaatcagatagacagaaagtttgctatgtttgtagtaaagtgatactggtaaaccattagattggagtaaaaataattgtgactgtttgagccttaaaataatgccatctatgggcaggagaaagcagctcgaactccaaagagggtatatattttggtgctccttcacgtgtggccaaagaaactatgggaaaagaagactctctcagagggtggagccaggcaccatgaagaaaaatgggaagggtgttactttcgggaagtaaaatcagggcctaatcaaaagttatttttcacctcatgtaatgggatcctcataattttgccctgtagatttcagaattgctaaggatcaatgtctcctagagtgtttctttcatttttccaccttctgaatggttatcttggttatcctgtcctgcttcactattgtataatgtgtttgtgggacagataacttgcttttctagttcttagacttaagatcaagagaagccactgccagggctttatattaaccccagatgtaagagacttttgcatatgacccagagatcctgaactctgagcttgatgccattttggattgtctctatggagaggtaataagtatattttgcctgtggaagaataacgaataggatatttggtcaggtgtagggcatattatggtggtcattattgccactcaccaaatcttccctgttcacgccttttttggtacacggtaggattacatttccttgttcctttgcagttagatgaaacaatgtgtcttgcttttaccagtgaaatgtaagtggtaatatgccatttctggttataattttaagagctaatgtgtaacttgctactctttcttcttcttggcttgtaatatggagatggagcctctttctgcctgcaggctggtgggacagcaacccaagccgacctgtgataaactgtagtgagagtattactgttattgtaggacaacctagcctactctgactgatacaacaatctttggtttggcagcttctggaaattttttggaaaatatgaatatataaggtaagttgatctaaagtttactacaagcttaattgttcctccagaaatgtctaaactatggtagacaacttagctaaaatggaagtaacattacattgagcttgtgagttgtagcttctgaggtatttgctgaccatcctggcttctgaggtatttgctgaccatccttgtatcatcaatcaatgtaagctttcctgccattagctgagtttagcgtaagacagaagatctgaaactcaagaccagccctgggcaaggcacagtggctcatgcctgtaatrccagcagtttgggaggccacagtgggaggactgcttgaacccaggagtctaagaccagcctgggcaatatagccagaccctatctctacaaaaagtaagaaaaattagccagacgtcgtggcatgtgcctgtggtcccaactacttgggaggctgaggtgggaggatcacttgagcccaggaggtcaagtctgtagtgaaccatgatcataccactgcactccagctaggcaacagagggagaacctttcttaaaaacaaagacaagaacaaacaaggtctgagaactggacacattttgccacctaactttagagttaagtgaattaggaacaagtggggctagctttacaawactagattcattatgaaactagggataagttatcaacataattaaaaatgagaaaacagcagcccatgtaacaattgctttgtttttattatgctaaaattaaatgttttaaatacaaatgcatacagatcacataagtaatttacattgctaaattctttagcatttaatagaactaatatttatatctgatactttatacagaagaggaattctactatacttactatgtaaattagttcaaaaacaatttggttgttaccctcagctataaacagagatgataagttcaagctgatttgggaaattatttaatcagtaagggccaaatgtgtgcaaatgaaaatagaacatcatattgtacaaatcaacttcaatatgaaataatataatttctacatacaatttgactgtcctgtaaacattaacagtgcaaagtcaaagccacatttttacatttatatcacacaatggcataatttttcaaggatatgttaacatgaattacagaaaatgagacctcctgtgtaaaactttaccagaatgaaagttggaagaaaaagccacaactttgtgtaatttccttcagttaggtttattacatatttatattttacatatattttacaatttcttcaaggctagtcaagtgaagcagtgagaatggagaaggaacaaagaaatctgtaactggttgtgatcaattagttataaacaccacttggaccagtctgatttatttatttatttatttatttagagatggagtctcactttgtcacctagactgaagtgcagtggtgtgatctcagctcactgcaacctcagcctcccaggttcaagcgattctcccgcctcagcctccagtgtagctgggattacaggtgcgtgccaccacgcccggccaatgtttttttgtaattttagtaaagtcagggtttcaccatgttggtcaggctggtctcgaactcctgacctcaggtgatccactcgcctcggcctcccawtttctgggattacaggtgtgagccaytgctcccggcctgatttttttatatatgtttttaaaatttaagttacacatataaaaattaaaggttatcatttatgtgtgtcgctatgtgctagccctgtgccaagtgctttattattattttttatctttatgattgscctatgaggtaggcactagcattattataccagttttataataagaaaacaagaacataggttaaataactgtccaagattataatgctaataattggcgaagctggaatgaagccctgtctttctgactataaaactcacaygcttggtagggcatggtggctcacgcctgtaaggccagcactttgggaggctgaggcaggtggatcacttgaggtcaggagtttgagaccagtctggtcaacatggtgaaatcctgtctctcctaaaaaaaatacaaaaattagccaggcatggtggcaggttcctgtaatcccagctacatgggaggctgaggcactagaatcctttgaaccctaaaggcagaggttgcagtgagctgagatagtgccactgcactccagcctgagcaacagagagattcttgcctccaaaaaaaaaaaaaaaaaaagactcatacttttatgctgaatactcctctgcctcccataacatttttatattaatttaacagaattctagagaactctatgactaataaaatggattcaaaaaagtaaaaacttactttggattaattctgctctgctctttcaaatggaaatattctatgactcttttcctggcgtacattttaaaatgtcaatagatgatttaacaagatgtcttgtcttagatttgcccaaagaacgttgaaaactttgataagattagaggaagctagaaaaattatccattcaaactcagaagattttttttttatattaaacttgacttgaaagaggggtaaccagaattgacttggaagcacactatttctttttgttctggaaaactgctttgggctatttcattacatacaactaccaacaaaattggaggagtttggaaatctggagctctaaggggctaaactgtcctttacagtaaatctgtgtttgtctaggagtggtaacattgcatttctgcagaaagtgttacctttggacaagagagtctactccatgtatgtcattaagtgaaactgtgctgaaaattccatatagtttatattctggtagagagaggcagacaataacaaatacgtaaaatatatgtcagatgttgataagtgctctggagaaaaattaagtggagaaggggatagggtaggccttgcatggatttacaattttatttatttatttattattattttttgagatggagtctcgctgtctcacccaggctagagtgcagtggtgcaatcttggctcactgcaacctccgcctcccaggttcaagtgattctcccacctcagcctcctgagtagctagcattacaggcgtgtgcccctgtgcttggctagttttttttttttttttgtatttttagtagagacggggttttaccatgttggccaggctgggctcaaactcttgacatcaagtgatccacctgccttggtctcccaaagtgctgagattacaggtgtgagccactgcccagggccagcaattttatttatttagaaataacttcaaacttatgaaaaaatgcaagaatagtacaaaaaacttctgttttcattaaccattttaaggtaagttgctatcactcctgaatgctaccatcaaggactttctcctacataaccataacacaaccatcaaaatcgggaaattagtactgattctttactgccatcccattcagtttcaaaagttgtcctagtaatgttcttattaacaagagatttatatttggcatcatgcattgcatttaattatctttttgatgtccttcaatcaaaaccagtttttcagtgtttctttgactttcaaccttgacactttggaagattaccagccaattrttttgtagaatatttctctacgtggatttgtttgatgtttctcacagttagatgtcagttatacatttttggcaagkatgcatatcggtgatgttgtgttcttattgcatcctatcaagtgatagatgatttcaatttgtttcataactggtaactttgatcatttcaktaagaaggagtctattgggcaccttcactgtaaagtttctctttttttcctttgtaattaaaaagcattttatcgggaggtattttgagagtatgtaaatattccatgccacttagactttcatccrctagttttagtatctgtggatgtttcctgattgattatttcttttgtggtccgttatgttcactacatttatatgtcatcattctgctacagagaaaatctctttttttcagttatttattattcaaaaaatttatatcaggatgaatttataggttttattttattcaataagttcttttttagtattattaaattcaatgctcatattttctcagattttgtcagtgggggcctcttcaagctgacgtawgtgacattttgataaarctcccatctttgagcacttcctttttttctgtcataagattcaggctcatctgtaatttccttgccccagtcctagaatcagtcatttctcaagaatccctggatcccttcagtggaaaatggcatttgatatttggaaaccaagttttaagtgctaggtatgcttgtttctaatgagatatttatttttctttacttttttcycttggagataggggtctccctgtgttgcctagggtgatcttgaactcctgggctcrggtgatcctcttttttctctcttttcagcctttcacgtagctgactacaggttcatgctaccatgcttggctayaggtacatgccaccacacctagctgctaatagggtatttctgttaccataacttttwwaaaaaattttttatttattattgttttttaattttttgtgggtacataggtgtatatatttatggggtacatgaggtactttgatacaggcatgcaatgagtaatgatcacatcaaagaaaatggatattcatcacctcaagcacttaacttttgtgtaacaaacaatccaattatacacttttagttattttattttgtttatttatttatttttgagacagagtcttgctctgttgcccaggctagaatgcagtggtgctatctcagctcactgcaatctccacctcctggcttcaagtgattctcatgcctcagcctcccgagtagctgggattataggcatgcgtcaccaagccttgctaatttttgtatttttagtagagacagggcttcaccatgttcaccatgctgsccttgaactactgaacacaagtgattggsccaccttggcctcccaaagtgctgggattacaggcatgggccaccagccaacttttagttattttataaagtacaattaaattattattgactatagtcaccatgttgttttgtaaatactaggtcgtactcattttttctaaattttttttgtacccattaatcatcccaacctttccccaatcgtccagtacgctttccagcctccgttaaccatccttttatactctatctttatgaattcaattgttttcatttttagctcacacaaataactaagaacatgcaaagcttgtctttttatacctggcttacttcacttaatgacctccagttccaccrtgttgttgcagatgacaggatctcattcttttttacagctgaatactactccattgtgtatatatgtcacattttatttatccattaatctgttgtttccacatcttggctattgtgagcagtgctgcaacacatatgggagtgcagatatctcttcaatatactgatttcctttcttttgggtatatatgaagcagtaggtagctctatttttagttttttgaggaacctccaaagtgttctctgtagtggttttacaaattcacatttccaccaacaatgtataagggtgtccctttctcaccaacatttttcattgcttgtcttttggatataagccactttaactgggttgagatactatctcattgtagttttgatttgcatttctctaatgatcaaggatgttgagcatcttttcatatgtctgctgtttgtatattttattttgagaaatgcgtattcaaattttttgctcttttttttttttttttgagacggagtcttgctctgttgctctagctgaagtacagtggtgtgatctcggctcaccacaacctccacctcctgggttcaagtgattctcctgcctcagcctccctagtaactggaggtagctaccagcatgcgccaccatgccgggctaatttttgtatttttagtagagatggggtttcactatgttggtcaggctggtcttgaactcctgacctcaggtgatccacccgcctcggcctcccaaagtaccgggattacagacatgagccaccgcaccgggcctcttttgctcatttttaaaactagattattagatcttttcctatagaaatgtttgattaaccctttggattaatccatggttattaatcctttgtcagatggggaatttgaaaatattttctcccaatttgtgggttgtcttttaactttgttgattgtttcctttgctatgcagaagcttttaaacttgatatgatccaatttgtccatttttgctttaattgcctgtgctcgtggggtattacttgagaaatttttgcccagaycaaygtcctgaagagtttccccaatgttttttttagtagtttcatagttcaaagtcttaattttaagtctttaatccatttgatttgatttttgtayaaggcgagagataggggtcaagtttcatttttctgcctgtggatatccagtttttctagcaccatttattgaagagactgtcttttcctcaatgtatgttcttggcacctttgttgaaaatgagttcactgtaggtgtgtggatttgtttrtgtattctccattctgttccattggtctatgtgtctgtttttatgccagtaccatgctgttggtcactatagctctgtagtataatttgaaggtaggtaatgtgatttctccagttttcttctttttgctcagggtggctttggctattctgggtcttttgtggttccacataaattgtaggattgtttttttctatttctgtgatgaatgtcattggtatttttatagggattgcattgaatctatagattgctttgggttgcagggacattataacagtattgattcttccaagccatgaacgtgggctatcattccattttctggtatcctcttcaatttctttcatcagtcttttataattttcattgtagagacctttcacttctttggttagctcctagggatttaatttatgtgtggttgttttaaatgggattgcttttttgatttctctttcggagttttcactattggcmtgtagaaatgctactgatttttgtatgttgattttstatcctgcaactttgctgaatttgttctaatagttttgttttgtttkaaactcatgttgtttaattaacagttttttggtggagtctttaggtttttccaaatatgaaattatatcatctgcaaaaatagataatttgacttcttccttcccaacttagatgccctttatttctcccatatatttttaktggacagagctggaattatatgtataaatatacatatgaatacattaatttgtatgtatgtatatatatatgctcatatacatatacacatgcacatatttatttacatattcatttttatatttatatatactgaaaacatgaataaatatctatatcctccaattccaatccaaaaccacaggattcatcatcggttttttttctttatttttttttttgagatggaatttcactcttgttacccaggctggagtgcaatggcgtgatcctggcttactgcaacctctgcctcctgggttcaagcgattctcctgcctcatcctcctgagtagctgggattacaggtaccctccaccaygcctggctaatttttgtatttttagtagagacagggtttcactgtgttggccaggctggtctcgaactcctgacttcaggtgatccacctgccttggcctcccgaagtgttggtattacaggcatkagccactcatcatagttttctatctctccatattgtaactcccttttcccacagtgagaaactgggctrccatcccccttaacatatttatgcattagatgagtcccttctgaatggaaccaatttcctgattctcctaccagcacccttcctcgacaggactgagctctttatcctctttctaccttatcctgtttaggtactgacagcctgcttcatgctccctytgccagagccccctgtactgatggcctccttgccttgygcagcacaatgcacargtgtgtcaccccaccccaaccctgcataaatgactaccttgctgggcctttgaactaaattatttaggaaggcaggaagaatatgaagttaacaattttaaatggaatgctagggtaacaccttgctaagatgacatttgagattatagatctgaaaatacgaagttgatgcaggcatgggtgggtcatgtggatatttagggaagagtattctggcagagagagtaacatgtgcaagagctgtgaggcaaaaagttgcctgcatgtataaagtagagaggccaccatcattggagtaccgtgagcaaggaagaaagtagtagatgaagtcagagaagtgctgggggaccaagtagtagatgaggtcagagaagtgctggsggatcagactttgtagggtcttgtagaccattgtacagtcttggctttttctttaagtgagctggagaaccatgggaggattttgaacagtggagtgatgtagtttgacacgtgttttgaaaggattactttggttcctgtgtcgagagtagatggtgtatgtgtggggtggcaggatgtaggggagagggaagttgaaaacaggggaacagctaagatactattgagataattagaagagaaattagactaagtgtggttgctgtggaggtggtgagcattggtcagactctgaacatattttgaaggtagagctgatgggatttgctgatggattagatgtagagtgtaaaaaccaaagagccaatgatagctccaaagttttgctgactggtaggatggttaccattcactgaaatgggttagcctgtgggaaaagcaagtttgagcaaaaatattatgagttttgtgctaagcatattaagtttgggtgtatattggacatcaaaagggacatatttaataggtaattaaatatatgtgtctggaggctgggggagagacttgggttggaggtaaaactttgggaagtttcatcatatagagagtattcaaagccttgtggtagatgaaagggtgtaaaatatgaatagaagagaactaaggaatgaaccctggggcatggcaacaatatgaaaaaaaaaaaaccaacaaagcataaaagatggttagaagtaactagtgaggtaggggaagcccggggacatgttctggaagcagaataaacaaaatattcaaggagaagggaaataccaagtaaggtaaggaccgagatataggaacatagaggccattcctgaagagagctgtttcagtggagtgatgagaacaaaagcctgattgaaataggtgcaagagagaacggaaacactagaactggattaagcaagtcacyggcaaccttttagggagttctgatataaagagagcagagaagtggggaagtaactggtaaaggaagttgaaasaagagagtttattttgccaagatgagwaatattatagttcatttttatgctgatggaaaagtctcagtagaaagggaaaattgataatgcatgagagaggagaaaatagctagagctatgtccttaagtagatgtattagtttgctttcacactgctataaagaactacctgagactgggtaatttataaagaaaagaggtttaattgactcacagttctgcatggctggggaagcctcatgaaacttacaatcatggcagaagatgaaggggaagcaaggtacatcttacatggctgcagaagagagagagagagaggagagagagaggaaagagaaagagagagagagagagaagggggaagtgccacacactttcaaacaaccagatcttgtgagaactcactaactatcacgagaacagcaaaggggaactctgccccatgattcaatcacctcccacaaggcccctccccaatacatggggattacaattcgagatgagatttgggtggggacacagagccaaaccatatcagtaggtgacagggaatatgttcaggacttgacctaactagaagcatggcaaatgccttcatagcagtaaaacagaaggcagagtattggacacggaagaaggcaggtggttatacatggtggttaagagtttgtggatattctcttctgatttgctttcagttttttttaaggaaataggaaaaaaatatcattagctgagattgaggatggtggaaaaggtgatgatagatgcctatgaaagaagaaagcatgaaatagtggtctatgagagagggagaaagaataaactagaagagacaaagtataattgcttggcagcaaagcacctttacttagtggttatgaattcaaagcaagagaccaactggaatgatttggggtgtgtgtgcatttttttctccccattcacattccattgagtgaatgcaggtgcagaatgtggaggctagtatagagacagtgagaaaagagcaagggagttgatagtatacttaaaggatgaatataaagatgcaatgatgcaattaatctgggaagataagaaaatgaagatttcagttgagttaggaacactgaaaggtgataagatcaatggactataggtctctatgagatcaaagaattgttacagtcagaaaactggaaagagtgagctggagagataaaaagatcatggttagtgaatggaatgtctgaaataaaaattatgggtagctgcaattatcagtaataacaatacttaggtgtgactatggggagtcattgcctgagataggatagaggataagaccattgattggaaaagaggagatcaagtaattaagaatgcagagtattaggaccattgatcagatcaggacattaaaataatcatgaattatgaccsaagtagtgttggagacagtactagaagtgggcscaaagcccaaatatccaaggcattaaaggaagtgatctggaggtgaacagatgactacaacaaggagggtagagggtgatatggcttgatgaagagaataaggttaggtttctttcttaaaaggaataggagaatggtctggaagtaacagcggaggagcaagaaggacaattataccrtgaagagctgtgggtaaaattttatcctgaaatttcattacaaaatagctttggttcagaaatgtctaaatctgaatttattatggatagcaaatacttaagagaaaaawatcatgaaatataagcttaacgagatcagggatttttttttttggtcattttcatttactgttatagtcccaattcctacaataatgcctagcatataacagatattcaacaaatggttgttaaattgtgaatgaataataagaagtaaagatgaaatctagtttttgtgtttttggggaaattcacatcttactttttaatgatggccatagaaattaccactgaaaaatattgggaaacctagtatttagttaacagatagaatgtgagggaagtacaatgaaaggaactcagaaatgccaacaaaatacaattttaaatgttttctttttaccaaaagtactttctaaaaatgaaaacaaggaaaatgtaaggattctgattgtactctgtaagtactcactccagggcagcagcacgtgctctggtggcatctggtcctcattgtgggtagcaaatttcttgtatttgccatgacacaatgtattattgtgcatatgtgttgagtggcaagaagtttgctactctcagtggggaagaatcaaaatttgagtagaatttacttaaagaaataatctaagaacacatgtcatgattattcttataacagcctttctgtgtttttgaaagagagaaaccagatttgcagcaagtatgctacaagatgtacataatctgcagcctatcttatgtactccacacctgtagtgtcaattggtataaactttctagaaggaaattgactgtagataggaaatcttcaccatatttatgaaagttgataccgcaattccacttctatgatagtatcagtgttgtttatgtaaatggtgaaaaatcctatttcaccagcctggttatataaaaagtcacatttagtttaaaaaacatatagttatgtaaattgctcatgattctgccttctcaaagtagaaaaacagctggtaatgcactttgaagccacactcttgtaaactgttgaaaaacgtagggggcttaatttgctaaaagggatcatcttccaaaccctaggcagagaggcaagagaatgtgactaacactctagtttgtcttgccattgtaacattttaccttactcaaacgaatatgtctttggctatcgtgatgccgctgtcatcactatgaccacctgtatgggccacartagttctttttggagatcttactctctcagtcttrtactcaggcatgagtgacccacagtttagcatttacaggtgcagattttatgactgtaaaatgtaacacatgcttattggataatacaaacaacaactagtaacatttcagaccatttctttctctattattgggatgttacagtaattctttttttttttttttttgagacggagtttccctcttgtcacccaggctggagtgcaatggcacgacctcggctcactgcaacctcccgggttcaagtgattctcctgcctcagcctcccgagtagctaggattacaggtgcccgccaccatgccccactaattttttgtattttttgtagagatgaggcttcaccacattggccaggctggtctcgaactcctgacctcaggtgattcacctgcctcggtctcccaaggtgttgggattacaggcgtgagccaccacacctggcctacagtaattctttttttttttttttaatgtttagctattgcatttaatattacattgtaagcatttccacataattttggatttttttttaaacctaatagttaatagtcacaaaataaactattgtaaggtgtaccacaatttatttaagtaatccttgattgctagatatttaagttgtttttattgcttctttatttgcagggttcctatgccaagatttcaaatgagcaggcgaaaggcttaaagaattgactcttgaggccgggcccggtggctcacgcctgtaatcccagcactttgggaggccaaggcgggtggatcacgaggtcaggagattgaggccatcctggctaacatggtgaaacccygtctctactaaaaatacaaaaaattagccaggcctggtggcgggcaccagtagtcccagctactagggaggctgcagcaggagaatggcgtgaacccgggaggtggagcttgcagcgagccgagatggcgccactgcactccagcccgggagacagagcaagactccgtcttaaaaaaaaaaaaaaaaaaaaaaattttgactcttgaaaggaactcttgatgagcgtcagagttgggcaagtaaactgaggcataaactaatctattgaatacctagatattattatcagtcgcattatagccctgcccttaaaaccaggctctgacttaggcctgggggcaggagaatcacagaacagtagcagtattatatgtcacaggttttctttttttaaatctgtatttgcatgaagcaaaaataacccatcaagtaattcatttcagtaaaaatatgactttattgtttcaagtcctgccatgctactaatggatgctagagggcagcagaagccaggaactggcaggaaaagcactagcttcgataggctaaagaggctctgccacgtctggggaaccatctgttcagggcagagacagaagtttgggttcaaggaatctgcaataaaggttctattcagtaacttgagaggccaacaaaatagaggagtaacaagattgctaaaaagggctaggtgcttaacaggcacttaccttaaaccttttggaggattgaaacagacaaaggaagacttggaagcatcaccaacttaataagccaaaagccatgggttaccaggttatccatttgaaggaaaggatagaattaagctgtagtaaagtttgaagcacacatattagggaagcacgatgtctgtacaagaactggggttgtcagagagtcatgacaacatggctctgacatcctctgaatacacgctccattgaaaggaccacttgtcagggtaagaagtgggtagggcgtgaggaagtgggtagcgcgtggggaagtgggtagggcgtgaggaagtgggtagctcgtaagctatgggaagaggcaacattttggtaaaacagtttctgacttctgatggtagaaaggacactagttaggagtcctgagaactggattctaggtctatctaccaattacttatatgaccttcagcaagtcactcccacttacttgggattctggtttctcacggacaaattaggtagttgaagactggatgaattcttaaatgtctaagatgtctgaaattccagggctggattgattggtttgatctatttaatcaaaactataacccagtaacactgtgcagacagagtgagataacagcctaccgtcattmcttcctttgtctctacaaattgtcctaatgcagctaggctaacagcgttgcgatcccaccatttagttttacacatgtgaagagcagaagggagagtatttgacgtttcatattgtgtattaaygtaagaggaaaaagaaggagcacgatttcccaggattctttgatcctgttttaaatagactagtatatatctgtaaaatcttcagaggatttgtaagataatataaaaagactcattattgcagtttaaactttttggttgctgatccttgggtcatggaggtaggaagaatttaaaggatctaagggatagtttagatttctgtaaccaaagcttgtatttttgaattttaaagtagtagataatgataagcacattggcaaaatgttcattatttccttttctctaactatcactgtatgattacaaataactttttttgtttttgtttwcaaatttcttttaaatttatttataaacctatttcaaggccgggcgtggtggctyaagcctgtaatcccagcactttgggaggccgaggtgcgcggatcacgaggtcaggagatcgagaccatcctggctaacatggtgaaaccccacctttactaaaaatacaaaaaacaattagccgggcgtgatggcgggcgcctgtagtcccagctactcgggaggctgaggcaggagaatggcgtgaacccgggaggcggagcttgcagtgagccgagatcatgccactgcactccagcctgggcgacagagcgagactctgtctcaaaaaaaaaaaaaaaaaaaacctatttcaaagtgaaagttattgctatttgaattttatacctttatgtaaaaatttaataagtagataaattkgaagaggctgtttatggttattagactacaaacttttttttgataaactactttcttatgaatagacatggagaaatgtaaaatacagacatttaaaaatatcaaacaactttaaaactgcttggaagtaaaatctgatctgatttttcatttaattttatgcaaaaaattaaaaaatgtgatttaaagtgatgcacagtcaaactgatttttaaagctagacaatatcatagacatcatctagtgcaagtggtccttgatctttttactgccaagtgcccttttaattgtttttgtctctagtgattcaacattttgaaatattttggctatttttttcaccaaaagcatttcttaaattataattaggtttttcatcttaaattagtctgaaacacatataactgcttatctttttagcgtgggtttagcaataacaccatcctgagatgatgaattccaaccaaatttaaaaaatcctagcatttagtgcagattcactgtgaaaaaatgtgttaattatattatagtttggaaaaattgaaaatagggcctggactcctgtggactctgggaaactatttcttttccctcaatttgccaatgaatagcttaatcacttgtttaatgtcacactgattcaagtccaatgttctatctgcaattctgagtattctttcttctttaggattaatcattacagctgatggtaatgactgaagttaagttcatacttctctcaagaggagaatctagaaatttgggttggttggttttttagtttgttttttcttagatgacacttaaactgaaaataatctaagtttaggagacatttcaggtaccagattcacagaactaaattctgtatatttcctggaaaataggtatgataatctgtcttactgttgttttctttctggaatccttcaagaataagaaacaagaggttattttgttttagcagtgtgcctgtgtgactgttatttcatcacttaaactttactagatgctaatttacttgcaaaatagaaaatcattaatttccaattctgtaggagtcaaatagcaacattgtgtgtgtgtgtgtgtgtgtgtgtgtgtgtttgctgattacagtcacagttctccctgcccaagcccataaacatgttacacatgtataacatttttagagttgagggaggaaacccattttgagtactcctgaaatacccaagtatacgttacctacttctcctactcacagagacaactctgattcttcttctcttcctgcgtatacacagccaaaactatctcttgccacctctgctatcctgccgtgattcctggaaggtctgtagcaatatatatatatatatatatattttttaattttaagagatggggtcttgctcagttgttcaggcttgagggcagtggcagtggctattcacaagcatgatcattgcacactacggcctccaactcctgggctcaagtcatcctcctggttcagggtcttcaggtgtgtgccatagaacctggctcaaataaggttctggtttttttttttttttttttttttttcagatcaaaatgtatgaacatgtcatcttggagggttaacacaatgatttattatcagcataaccaagttcatatgagttattctaactgagttaactagcagagagtagggattagaagtaagaaagaaaatttggaggagtggttagatgaaggatgatggaactcagaatacccaagggacaaggtatgccaatgacagttattatgaatgtaccaggagcttgaagttgaaattaaagaaagatgaggctggtggagggatgatagaatgatagagaaagaaatgttttcttattcataattttgtatgcagaatttgtattctaagaaaagccaagtctttaccaatgttatttgaaagggctttggctggccacggtggctcacgcctgtaattccagcattttgggaggctaaggtgggtggatcacctgaggtcaggagtttgagaccagcctggccaacatggtaaaaccccatctccattaaaaaaaaaaaaggctgggcatagtggctcacacctgtaatcccagcactttggsaagctgaggtgggaggatcacctgaggtcaggagttcaagaccagcttggccaacatggtgaaaccccatctctactaaaaatacaaaaattagccaggccatcagagaaatgcaaatcaaaaccacaatgagataccatctcacaccagttagaatggcaatcattaaaaagtmaggaaacaacaggtgctggagaggatgtggagaaataggaacacttttacactgttggtgggactgtaawctagttcaaccattgtggaagtcagtgtggcgactcctcagggatctagaactagaaataccatttgacccagccatcccattactgggtatatacccaagggactataaatcatgctgctataaagacacatgcacacgtatgtttattgcggcactattcacaatagcaaagacttggaaccaaaccaaatgtccaacaatgatagactggattaagaaaatgtggcacatatacaccatggaattctatgcagccataaaaaatgatgagttcatgtcctttgtagggacatggatgaaattggaaatcatcattctcagtaaactatcacaagaacaaaaaaccaaacaccgcatattctcactcctaggtgggaattgaacaatgagaacacatggacacaggaaggggaacatcacactctggggactgttgtggggtggggggaggggggagggatagcactgggagatatacttaatgctagatgatgagttagtgggtgcagcacaccagcatggtacatgtatacatatgtaactaacctgcacattgtgcacatgtaccctaaaacttaaagtataataataataataaaaaaaaagaaaaaaaatttgccaggcatggtggcaggctcctgtaatcccagctacttgggaggctgaggcaggagaatcgcttgaacccaggagttggaggttgcagtgagtgagctgagatcgtgccactgcactccagcctgggcaacaagagtgaaactccatctaaaaaaaaaaaaaaaaccaaaaaaaaaaaaaaaagaaggggccttattttggctgggttcatgcctgtaatcccgcaactttatgaggctgaggcaggagaatcacttgagcctaggagtttgagtccagcctgggcaacatggtgaaacctcatctctacaaaaaatacaaaaattagctgggcgtggtggtgcatacctgtagtcccagctacttgggaggctgaggtgggaggagcacttgagcccagggtggtggaggctgcggtgagctgtgatcacaccactgcactccagcctgggtgtcaaagtgggaccctgtgtcaaagaaaaaaaaaaaaagaaaaaaaagaaagtgtcatatttttatacctgcttccagcactgacttagcagtggaatcatctctgttagactttgcttttaatattgcaatcatcactagaataaaatgaaatttcaattttatgttttttaatgataaacaattaaaaatacttcaatagtccatgaaatattcattgtattttaagtttgcatccagagaatatttagagatcaccttttaaaacaacatcaaataattttgactagaaaacacttagacctctttaggaaagagagcattgtagggttttatagaattgtgcagctcatacttgcatagttggtcagtggcaaagtctggcccaaaagcaaattacctgttccccctgagatgctcatttcttaagtatgaggttcctgaggaactgaaaataaacgaaagttgaaaatgttttaatagatgaatgcacagctgaattctactagacatgtaaagaatagctgataccattcctgctgatactattcccaaaaaatcgaggaggaaggactccttcctaactcattacataggtcagcataattctaatacaaaacctggcagagacacaaagaaaaaaatttcaagccaatatccctgatgagcatagatacaaaagtcctcaacagaatactagcaaactgaatccagcagtacatcaaaaaagctagtctgctatgatcaagtaggctttattcctgagatgcaagtctggttcagcatacacaaatcattaaatctgatttatgacataaacagaacaacaaacaaaaatcacataatcatctcaatagattcagaaaaaggcttttgataaaattcaacatcctttcatgttaaaaaccctcaacaaactaggcactgaagaaatataccttaaaataaaagccatttatgacaagcccacagccaatgtcctactgaataggcaaaagttggaagcatttcccttgagaaccagaacaagacaagattgcctactctcaccacttctattcaacatagtactggaggtcctagccagagcaatcaggcaagagagataaataaaaggaacccagatgggaagagaggaaatcaaactatctctcttcacagatgagttaagtctatagctggaaaaacctcatattctctacccgaaggatcctagatctgataaacaacttcagtacagtttcaggatacaaaatcaatgtacaaaaacagtagctttcctttaaaattttttttttcacaacttttaagttcaggaatacatgtgcaggatgtgcaggtttgttacataggtaaacacgtgccatggtggtttgctgcactgatcgtcccatcacataggtaataagtctagcatccattagctattcttcttgatgctctccctccaccaagcccccatcttccaacaggccccagtgtgtgtcgttcccctacaagtgttctcatcattgagcccccacttatgagtgagaacatgtggtatttggttttctgttcctgcgttaatttgctgaggataatggcttgcagctccatccatgtccctacaaaggacatgacctcattctttttatggctgcatagtattcctggttgtatatgtgatatggctccaatgactggaggaacaccaggatccttggtcttgtgccaatttaaataaaatgacacggacacaagtggagtggttttaaggtatggagagtttaataggcaagaaagaaggaagaagctccccactacagagacagagggagaggtctccaagccaagagaggaaaccctgagggggtggggtggaaacagccagttatatgaggaggctagaggaggtggtgtctgatatttgcatagggcccaggggattcgtttgaccaggtatgtcattcaagtagcccacaaaaaaactggctctcccaccctagacttttaatatgcaaatgcagggcaccatgatgtcctacacatgcagggatatgtgggggcagccatgttgctaggcacatgtggggacaagaagaggactttgggaatcgccatgtttgggtggacccagttctaatggctagcatttgcatattgaagtttgccagcctggctcttagagccagggcttttctgctagacaagaaatgtttctggagctgctttaaaaaaagaaaaaaccttcccaaggaccccttttcctctctatctgctaaaataatttcttaataactcctataacatatgcaccacattttctttatccagtatatcattgatgggcaggtaggttgattccatgtctttgctattgtaagtagtgctgcaatgaacatacatgtgcatacatctttataatggaataatttatatttctttgggtatatgcccagcaatgagattgctgggtgaaatgatatttcttcctctaggtccttgaggaattgacacactgtcttccactatggttgaactaatttatactcccaccaacagcataaaagtgttccttttttcttcacaacctcatcaacatctgctgctttttgactttttaagaatagccattctaattggtatgaaacggtatctcattatggttttgatttgtatttctctaatgatcggtgatgttgagcttttttcatatatttgcggtcgcatgtatgtgttcttttgagaagtgtctgttgatgtcctttgctcactttttaatggggtttttttaatgaatttaagtttcttgtagattctggatattagacctttgtcagatgcatagtttgcaaatatgttctctaattctgtaggttttctgttcattctgatgatagtttcttttgctgtgcagaagctctttaatcagatcccgtttgtcaattttggcttttgttgcaattgcttttggcatcttcatcatgaaatctttgccagtgtagattttcttctatggtttttgtagttttaggttttacatttgagtcttcaatccatcttgagatttttatatacggcgtaaggaagtggtccaatttcaattttctgcatatgcctagcgagttctcccagcaccatttattaaatagggcatcctttccccattgcttgtttttgtcaggtttgttgaagaccagatggttgtaggtgtgcagttttatttctgggttctctattttgttccattggtctacgtgtctgttcttgtatcaataccatgctgttttggttactgtaggcttgtgcttggtaccatgttagttactgggaatgttgtaatgaatatatttgaagtgaactctgcccagctggagcagcaagggcaagagagtaaaatgataagtgatttgaaggagatgaagagtgtaaggataaagaatgttgcttcttaccttgggtgaatgagttgagaatacttagagagggtagccaggaaagatgtctgagctaatatcatttagactgaaaccattgcgaacagagttgaccccctggacctcagggttcagtatgggtagcactatcacaggtgatgtgcctgtcaatgacctttcttcgtctctaggacttctgagtttgagtaatacaatgtggtcttattttcttttcctttatgaaggcatttggcttttatctttgttttctgagacagctgtttcattttattgatagatgttatgtcatcctatagcaagccagtgcctatttcatcttatgaggattgctttcttctacacattttttaaaactttttatgtttcttatttttattttttattatactttaagttctagggtacgtgtgcacaacgtgctggctcattacataggtatacatgtgccatgctggcctgctgcacccatcaacctgtcatttacattaggtatttctcccagtgctatccctccttctacctcccaccccacaacaggccctggtgtgattttcatttcaacctgtgtctttttatataaatgatgagctctttaaaaataaggatatttgttggtgcagatcagagaggagctgcaatccacaagttagagtgggattgttccattttgcaggtttgttttcctatatctcaatgactagtttctcataaacaattgaatattgcctaaaaagtaatttagaaggtcatttatgtaatatttaattccttcactgtcacagaatttcaactctttcaacgtatgatatttatttttctatccatgagcatgggactgtttttctatttgtttgtgtcctctctaacttttttgagcagtggtttgtagttctcgttgaagaagtctttcatttcccttgttagctgtattcctaggaattttattctttctgtggcaattgtgaatgggtgttcattcatgatttgactctctgcttccctattgttggtgtataggaatgcttgtaactttttgcacattgattttgtatcctgagactttcctgaagttgcttatcagcttaagaagcttttggctgagacgatggagttttctagatataggattatgtcatctgcaaaaaaagatagtttgacttcttcccttcatatttaaataaactatttctttctcttgactgattgccctggccagaacttccaatactacgttgaataggagtggtgaaagagggcatctttgtcttgtgccagttttcaaggggaatgcttccaccttttccccattcaggatgatattgactgtgggtttgtcatacatggctcttattattttgaggtatgtttcttcaatacctagtttattgagagttttcaacatgaagggatgttgaattgtatcaaaggttttttctgcatctattgagataattatgtggtttttggctttagttccatttatgtatgacccacatttattgatttgtgtatgttaaaccaagcttgcatccaggggatgaagcctacttgatcatggtggataagctttttgatgtactgctagatttggtttgccagcattttattgaggacttttgcatcgatgttcatcaagatattggcctgaagttttctttttttgttgtagctctgccagattttggcatcaggatgatgctggcctcatacaatgagttagcgaggagtccctccttttcaatttttggggaatagtttcagtagaaatggtaccagctcttctttgtatctctggtagaatttaactgtaaattcatctggttctggactttatttttggttggtaggctatttattactgcctcaatttcagaacttgttgttggttcatttagggattgaatttcttcctggtttgggagggtgtatgtgtccaggaatttatcaatttcttctagattttctaatttatgtgcatagaggtgtttatagtattctgtcatggttgtttgattttttatggggtcagtagtgatatcccccttatcatttcttttttattttattttatttttgagacagagttttgtgcttgtggcccagactggagtgcaatggtgtgatcccggctcacagcaacttcttcctcccaggttcaagagattctcctgcctcagcctccaaagtagctggaactgtaggcatgtgccaccacgcccagctaattttttgtatttttaggagagacggggtttcaccatgttggccaggctgttctcaaactcttcccctcaggtgatctgc

SEQ ID NO: 94218 - DNA, 20972 bp, Homo sapiens
ctagtacataaagtgcctctggattaaatcaagaaatccattctccagcttaatccaattgctttcaatgtagaaactactggaaacaagtcaagagatgaggaaaatgaacagatataaaataacgtacaaaaactgatatcggctaggtgtggtggcttacacctaaaatcccagcactttgggaggctgaagcaagaggattacttgagcccaggagttctagtccagcctgggcaacatagcaagatcctgtctctacaaaaaaatataaaaattagctgtagtctcagctactcaggagacccagctaaaatgaggcgtgaggcgtcccattttcctggggtgaagactgaggggtttcgcctttgaaaaatgaggtaatcttcaaaatacctggacttccaatgtttacactaggaatgaaacacggtccctttctctccccctaccgttggaacagcctttctgttaagcagactgaacaagaaaatctgtgactgtacccttagcttatcaactctgacaatttctcaacagaactacggccctcctcagtggaggggactgttggggagatgggggcgttgggcttgtgaagagggggctttgaatgtaggtacagagtgagaagagggggaggcagatgctgagatcagttataggcaacaagtcttgttttacgtaaggtgacacaaaggcatctttttagttttagcaaactggtgttactcaaatatcagcaagttatctttgtgtgtctttgtgtgtgtgtgtgtgagacaaggcctcactccgttgcacggcctcagctcactgcagccttgacttccccaggttcgagcgacccctgccacctcagcttcccaaggagctaggaccacaggaacatgccaccacacctggctaattttttgtagagacgggggtttcaccatattgcccaggctggtctcgaactcctgacctcaggtgatcctccccttggcctcccaaagtactgggattacaggtgtgagccactgcgcccggcctcacgcctcactttatgctcctgagctttcactcctataatatccagtatgttacaaccttcggaaatttccaccgaaggcaaacagctttggctgcatgcttgtgacttccgggaggacaagcccaggcagatcacgctcacgctctctccttctgtcacttcctcctacaaggcacgctgggccactctcctgcttcatctcaagagcacttaggggaacagaaaccactgaaatcagttactaggaggactccacggtgataagctcagcaatgagaaaaggaactgacatttccaacacaaattcacttatttagtcaataaatgttgagctgaaaaacaataaaaaggctttcaggctgaccacgatggaagcaccaggaagcacctcgaggatgctgggaggcagaggcgggcggatcacctgaggcctggagttcgagaccagcctggccaacatggcaaaacctcatctctactaaacatacaaaaattagccggaaatcacttaaacacaggaggcaaagattacagtgagccgagatggcgccattgcactccagcctgggcaacagagtgaggctctataaacaaaaaaaaaaaaaaaaaaaaaaaatgctgttgaaaagcccgaagaggcatatccccgcctaagtatgggcaggggccacccaaggggatgcaggtagacaccaagagttcatggcaaacctaccgcaaaccagcagcgaggcagatgtgcagatccagggggccagcattccatttctgcactttcaacaagtcatgaaaccctgagcctgttttctcaccaataaatggggaccagtgtccctactctaaggtatttgggagagacttgggagagctctgggtggactgtctcaccctgttcaaatgccagtgcatgcagctaccctggctttacagcaggaaacataaatggcaaggatattcaccacagcacacgcatcccagccaaaagccaaaagcaaccttgatgccacagtgagggagctggttaaagaacctacggtgcaagcactacatggaataggatgaaactttcccaatgacgacagtgtcttcagttgcatgggcggttggctgatctcattattcaggagaacctttttatatagaaaatcttactcaaaaccctaagatacaaaacagatgaaaactgtgtctcagcttcatccagagcaaagaatccatagccctggccatgaagcctcttctaggttccggacggagcagccccagtggggccaccaggaaagccccagggcttatgcgacttggaaatttagctgtgctgttggggaaagatgtcaatacatcattaagagtagccgggcaccatggctcacatctgtaatcccagcactttgggaggccgaggtgggcagatcacctgaggtcaagagttcgagatcagcctagccaacatagtgaaaccctgtctctacttaaaaaaacaaaaagaaaaaattagctgggtgcggtggcgggcgcctgtaatcccagctacttgggaggctgaggcaggagaatcgcttgaaccaggtaggcagaggttgcagtgagccgagatcacaccattgcactgcagcctgggcaagagtgagactccatctggaggggggggaagaacaaaaataataacaataataattatatatatatatatatatatatatatatatatatatatatatatatatataatacatatatgtatgtatcattaagcaaaaatagctccaataggctgcaaattagcaagaaaagtatggcacaacatcgcttttgaaaatgtgagggatctatgcatgcacaagcctggaaggatgcacaccaccatgctggtgctggtacctgcgggcggtctcatgcgaggtgatttccatgttcactgcacctttctaccttgtctttcattttgaaaatggcagcatcctatttttatcatcaccattgctaaaccacccactcggaagcacacgccttcaaaaaagggctccaccatcccgcatccactggcaaaggcagcttgcccatgcccactcagcctcaggggagccagaaggtgccaacagcagtgcagaggcccacctgtgcctgcggcgttgaccttctgcaccgccacctgactccaggccccaggagctgccccacagtctaacacccgaaggccgggccgcagaatctggtgcctctcgttcacctccaggagcttgaaggcgcttcgacaccggtaactctccaccttcgcagccttcacaaatgggtccctgagatgtcgggtcagccacaggtgctcagcgcctgtccgattcttgcagcgactcccaacagtgtggaacccttgacgctgaaaggaaacacacaccagcttcaagtacctggtgggagagaagaggagcaggcaggttggcatcacacagaacggcaggtcatgagctgggagggccctcggatcaactcattcatttctagagatggggcaccaaggcccaggaggggaggtgaactgataaggctacacagatggaaagcaggcatcacaggccaaactgtgtccccgcaaaattaatgtgttgatgtcctaacccttggtacctcagaatatgggggtattcggagacacctgtaattccagcacttttggaggccaagacaggtggatcccctgaggtcaggatttcgagaccagcctggccaaccgtggccaacatgatgaaaccccgtctctactaaaatgcaaaaattagcctggcgtggtggcagatgcctataaacccagctactcgggaggctgaagcaggagaatcgcctgaacccaggaggcagaggttgcagtgagccgagattgcgccactgcactccagcctgggcgacagagcgagactccgtctcaaacaataactaaatacatcaattaattaattaaagtaatattattttctcatctggcaaaaatgttcattgggctctgacaggctgcaagaaaacctcataaggacagatccttgccttagtgacctagttccagggctttgacagctagtacagagggtctggcctgtcacatttctttttttcttctttttttcgagacagggtctcgctctatagcccaggctggagtgcagtggtgaggtcacggttcaacgcagattcgaactcctgggctcaaacaatcctctcacctacatgtcttaaataaaattgaactaaacctgtgtcaatcgttgaaggacaatttccaagattctctagacaattgttacaataaatgtaacaatttattcacagcccacaatagctaagcaggtggaagctatacacacctccccttgtttaactctgacaacaacctcaccaaggaagttctatgtcctctttttctttttttaagacggagtctcactctggcgcccaggctggagtgcagtgacagctcactgcagcctccgactcccgggttcaagcaattctcctgccccagcctcccaagtagctgggattacaggcacacctgctaccatgtccggctaatgtttgtattttcagtatagatgggttccaccatgttggccaggctggtctcaaactcctgacctccgctgatctgcccgccttggcctcccaaagtgctgggattacaggtgtaagccactgcacccaggcatttttctttcttctttttgtttttttagagacagggttttactattacccaggctggagtgcagtggcatgatcacagctgactgcagccacagcctctggggctcaagtgaacctcccacctcagcctcctgagtagctgagactacaggtgtgtgccaccacttccggctaatttttctattttcagtagagatgggatttcaccatgttggccgagctggtctcgaactcctgacctctggcgatcagcccaccttggcctcccaaagtgctgggattacaggcgtgaaccacctcacccggccatttttgttttgctatcatccaggctggagttgcagtggcacaatcacagctgattgctgccataacctctgggtctcaagtgaacctcccacctcagcctcctgagtagctgggactacaggtgtgcaccaccatgcctgggctaattttttttttttttttaattcttaaaaaccttttttagagatggcatctcactacattgcctaggctggtctcgaactcctaggctcaaacgatcctcctgcctcagacttccaaagtgctgggatgacaggtgtgggccaccaagcccggtctctatgtccatctttctgatttaaataaataaataaaagttaccaccctcatggctccaaggccaaagcttctagcttctgcaacaccaaagcgtgctgacaagccaggaggcactgactgctgaccgtgagtcgctgtcttcccctcgcttaaggggtctcccgggaaaatggcacaagccggtcccgggggccagggcccactcgacagcccaggaagcgcgggcaatggagctacccggcccagaagcgaaatcccgccccgggctcgcccccggcgccttggatctgggccccggcgctgcgccccccacctggactccgccgccggccccggcctccccacggccccgccggccctgcccctggagacctgagggcgccctcctcccggggaactgcgacccggaatcctggcctcgcccctgtcgcgctcgctgagtgcggggacggtgcccagcgctcggcacccagccccgaggccaggaccgaggaaggcgaccgggcggacccccaaccactcccgctgtctgcacgcgcagcagcagcgcccagctcaccccgccattggtgttccccgcgcctgcagcgcgccgccggaagtgcctggcctcacttccggtcagaggccacgcccccggaagcggcggtgcaggtacgaaaagcgcgcgcggggattccaggagtcgtggtgaccagggaggggagccgggccagcgggcggcaggagactaggggagctgagccatgggcttgsgggagagcggggccgggagctcgaaggagaccagaagagcagggtcgggggctcgagggagacgaggagagcggggccgggggtttgggagagagacaaggagagcggggcggaggcttgggggagaccaggagtaaatcacaaaaatttactttggaaaccgtggcttctggcagaaacagatcagtgtcgggacaaagtacacgggcctggtgtgaaactaagccacaaacccatttaccctgtctgacctgcctccgccaccaggacccagtctcagtgaaatgggaaaggttcccttgtcctcctcgaagggcgtgcgatgaggatgtggctcacttcttcagtgccccgcttctcaagcctctaggggaacatacagacaggcaggctgaggggctcccaccccacggcagtgtctaggggtgaatgtttgcagctcctgaagccccagcaggcatgtgttagagggtgctctttcagtttagccttgtaggtggcttgtgttagtcagctgttagactccctgccttatcgcaaggacagagggctttctgtatccctaggtttcttgccttgatgtactggagcaatcagatcacacggcggcttggagagygagtgcaaggttttatgagtggaattagccctcagcagatgggggagccagaaggcagttggagtgggaaggtgattttcccctggagtcgggctgctgagcagcctgggctctcctctgaccgcccctgccaaactcatggttccatcagttgatggcctgctggtgcctgttggtgtgctttccacgtcctcttgacgtccagcggcttgtgtctctgcccactataaaaaaccactggggtttttttataggcacaggacggggacgtggcgggctcgggaaatgcaacatttgggcaaaaaaacagaaatgcctgtcctcacccaggtccctgggcacaggcctgggkgtggagccctggccagagaccacgccctcctctacccagcacttccctgcccccttccttatcatctggtcccttttctcagacaccacaacttccaagaaggatcactggtcctgaaccctgtgtcttgtccaggtgtggaccccagaaaagttggtcctggctgggcgcagtggctcacgcctgtaatctcagcactttgggaggctgaggtgggtggatcgcttgagctcaggagttcgtgaccagcctgggcaacgtgacaaaaccccatctctactaaaaatacagaaattagctgggtgtggcggctcatgcctgtggtcccagctatgtgggatgctgaggcaggaggatggcttcagccagggaggcggaggttacagtgaaccgcgatcacgccactctcctccagcctgggcaacagagcaggatcttgtctcaaaataaataaaggaaagttggtcctggccctccagcatttctccagggtccttttttcagcagggacctggcggaggcatcgccctcagagtcctctggacctggacctgcacacctatgggagcaggaaggacccttgtgacttccagtggcccccctgggtgccaggtcccacagtagccacagcaggagcagagtgggtggggtataaactcctatcacaggagggaggactagccgggcctggctgggtggacctgtgtctacagccacacatttcctgggaatctggaagcctgctacagagaggccaggtcccactagactgaaagaagttcctgttaatccaaaggcctgacctgaggaccacaggataaactgcgtggttattttggtgccaatcaggcacggggactgttgttcctcactgtgtgcctataagcagggggttcctgggggtagacgcaggagcaagagcacgctctggaaaggtgatgttgtcctctgcacctgagtactgacttgtggagaaggaaggtagcgccggcctctgctctgcttgatcagccctgctgaccactgggttctgtttctaccccagaaaatcactggttcaatggcagttttccacctgccacaagggaagccacacgtggcagggctggggagttacagcatacccccccgccccccactgcctcccagagcacgtccccttcctcctggcccctggcacgtgcttcctccacgcacgtcatggctgactctgccctctcaccttcctttcagaacccagggaccatgggcgcctccaggctctataccctggtgctggtcctgcagcctcagcgagttctcctgggcatgaaaaagcgaggcttcggggccggccggtggaatggctttgggggcaaagtgcaagaaggagagaccatcgaggatggggctaggaggtaaggatggggcaggtctggccatagaaccggctttcccagggcacagggattsgggctgtagggccacacccttggtttcaccactaagagctaagtgacctggagcagggggttaagcgtgagcctcagtgtcttcatctcagaatgaagaacagtccgcagcccttcggactcttgtgaagataaratgaggaaatgaactcgaaggacttagaacggtgygcggtgtgcggtgcgtgctgagtgcgtgttagctgttgtggtgcggtggtgctgggggctgcagggcgtatctggaagcctctgtgcagcagcttgaattgaaccctcccagcaccctcactgttgccgaagggctcgtcagtcacttggttcctctgtctgttcagtggagctgatgatcgctttcatctcacactcgctgtgcacaaagcctcactgcatcctcaacacagccagcttcacctaggaaggaactgaagcccagagaggttgagccgtttacccaagatcacacagtcctccagacgcccctcaaccctcacagggtaaatgagatcatctgtgtaaacatcgctgcacagacgttagcccccgttcgtgtttttgttctgagaaaggtaggccagcttgcctggagaggagaactacagastaaagagggtcctggcacggaggaaagccaggacgctgcagcctagtggctttccaattttttcatcacaacctgcagtaagaaatacgttttgtactctgatagagtgtacacactcaggtgtgcaggtacagctaaagtaagttgcagtagccgccyttattacataaaagggggctctacttttccgattcatttctctttttttctccagaggtgggatctcacccatggcacactcttggctcactgcagcctcaaactcttgggctcaaacgatcctcctgcctcagcctcacgaacagctgggaccacaggcacatgccaccacgctcagttcgttttttaattctttgtagagatggtgtctcattaactcccaggctcaagcgatcctccctcccgggcctcccagagtgctgagattgcaggtgtgggccactggcttgacccttttttttttttcaattgcaatccactaagccgatttcccggggtacatgggtcccaaccctcagtttggagagccctgtgtgtgcttcccctccaaggcttgggaccccagaccgcagccacacggacacgttcgatcagtcactgtggcaggtgccagtgcgacaggctctgtgctgggggccgcagctggggaggaggaccactgggtgtgagtcgggcatacagcgtgtccctgccaggagtgtgtgcagagcgaccacagcacaggaaacaggaaaggtggccccgggggttctctgcccagccctttgtctttgatctgctaagactgcccatcagctcatggatttctgtagcgctgctctgtgtggggcctggggacatgaggaggaacaggtcagtccctgcctctgtggagctctcgtgtcatctggctgccgggttcaggagacctgcagaaggaggtctggtccatacctcgtggccaggggcctccaggagaaaggaagggagaataactgggcaccaggaaaatgctctgagggcctgacgttggctgggagagtgtggaaggagggaggaaggagacatttgcagaagcacagagggctggaggagcgccagctgtgcagagaagtggtgggtgtgagtggagcaggcagcggtgctgaggaggctggatggaggaactccaggtggctggatttccgcttctcgtcctgctggtgacaagcaaagcacaggccccctcggcagccctgctttattttcttctgaactttgtcacggtcgaaggaactttcctcctaccctctgtaaatattacacaaacagagggaccatcactccagaccctcaaagctgaatacagyggtggcttgctgtcagaccagggtttgagggggggaactgaggcacagagccggaagcctgtgacttccatcctcgggtgtaacctggagacgggggtttcaccatgttggccaggctggtcttgaacacctgacctcamgggatccacccgcctcggcttcccaaagtgctgtgattacaggcgtgagccaccgtgcccagccgagaccctgtcttaaagaaagaaagaaaaaaatccttcgttggggagcatctgcaagcatgaggaatgggggacactggagccagacaggctggtgcttaggggtcccagggccccgggaacccagcagcaaacagcctcgccctcaggggatgacgtaccatcagccacaggccaccagcacggccctgggcttcagtacctgcgagtctgaatggatttgctccyggggcaaccccaggcccgtgctgctcaggagsgggaggcagggaggagcgtcggcagcccggtctctggggaggctggttcctgctttatccacgcaatacccagtcctattctatcaggaggaccccaagatgggccctaactcccaggccaagagccggtttaggcaccctccccgcttgcctgcagggggcaggcctgagcgcctaaccccagtccagagggctggactcagaccctcctctgtggggcaggggacaggcacgtagggagtactgaattgtgggggtgtgcagatttgggcttcaggcgcacrgtgtgagccgacctttctagacagcatccctgrtccccaaagactagcgaggccggggacacaggagcagcgatgggaagcaggcccgccggaacctccgactcccacctccccacgccacggacgctgcaccaccctgtgtttttgtttcatgtatttctcaccctgttccccgtgttccgcctggggaaccgagtgccatggacagagcagacacttgggcagaactgaacagcgtcatcttcgcctgcctggcgctccctgcctgggaaatggagcttcagctctgtctcccggcggattcttgatgcttcctacgctgccatgtgctagggaagattaactaaaatcagtcacaatatcccactgggaggtgacgctttttaagacgagcaacagccggccgccaagaggcgggtgaggccccactgagcacttctattgcatctaactggggagccatttrtacccaagtagaagcacacgttcactttgtagctcaagcccaactttaattagccatctgtatgaataaatgctgattccaggtccgtttcctctccagtccctgcagtttaagctgaggaggcatcgcttaaatcagaccatttagaccaggcatggtggctcacacctgaaatcccagcactttgggaggccaaagcagaaggatcgcttgagcccaggagttcaggaccagcctgggcaacatagcaagaccctgtctctacagaaaaacayacacacagaaaaattagccgkgcatggtaagaggaggagactgaggtgcccagcggctgcagcccgtgcatccccagggtcccagcacagagtgggtgttcagaagtgtctgctgagggactgagcaagaacccgactgagcacagcaagcaaacgctcagaacgggaggtcagcagcaccgctgtgcccaacacgggtttccaccataacccgaagttggaacgttttattcttccataccaaacaggagttgagaaggcggctgggttccttgaggtgtggaatgtcatgcactcctcctttcttgcgtggaaagcccgaggtataaagtgtgtatgatgtttgcttttttttttttttttttttttaagacagggtctagctcggttgcccaggctggagtgcagtggagtaatcccagctcactgcagcctccaactcctgggctcaagcattcctcccatctcagtctcctgaggagctgggactacaggcgagtgccaccatgcccagctaatttctgtcctttttgtagaaacagggttttgccatattgcccaagctggtctcaaactccggagctcaagcaatcaatcctcccaccttggcctccaaaaatgctgggattacaggcatgagccaccctgcacccaacctgtttgcatttttattttttaactttaagctattaagggttaatgtttgcrtttcttaagggaaaaacagaggagaaagagccaaaggaaaaacactgaaatggtagcattcctgggtgatgagtttatggcgttttgtttcctggttgtctataacaaatatgtaatttttaaatyagcaacagcgttagactacttcggggaaacctggctctgtgtgccacgaagcagggaagggcttgttcccaggcgcagcagcacttgggcatcccgtggtgaagtcagccccttacacctcctccaggcacagctgtggggagcatgtccmgagaaggcgcaggaagaggcccaggccacgtgtcccgtgtggtcagcctggggaccagagttaaaaccagagctcctccttcaggaaacagatcatagaagcctgtggtttcatcctgtgttctcagagaagaggcaccaggctggaaagacatttctttgggcagacaggcccagagtatagggcccaggttcccagagcaagcgtcccagggccccggcggtcgtaactaccgctgcatgggctctgatgctcagccgcggaaaagcaagtaaccgggaatgaaggaagtggggtcagtcccaaccctgccacgtgcgggtctcgagacggtggacaagtggctggactccactgggcctgggctgtcactggtacacagagggcactgggctagaactgcgttcctcccaccagaggctccacaccatctccgggcccctccccagagcctytcaaccaaaatcagtgtcttcaaagttcaagttgattctgaagctcagccaggtcgggaccagataatgcattctaggggacatcctcctgggtctcccatccaccctggtggctccctgggctgtgtgtagatgcccagctcctcctccctgccatcgtgtgggcatggcaccatgccctgacggcctccctcccctgcccacctctgcccgcagggagctgcaggaggagagcggtctgacagtggacgccctgcacaaggtgggccagatcgtgtttgagttcgtgggcgagcctgagctcatggacrtgcatgtcttctgcacagacagcatccaggggacccccgtggagagcgayggtgagtctcacagggcctgctccccctccccactatgcgggtcccatctcctggctgggagaaaggccatccgcccaaaccatctctgagtgccagggaccgggcagcctgcgtccccctccaccccacagtgccagcgtggggcccatgagccgtggtctctgcaccgaggctccagtagcgtacctgcccctgctctgcgcccaccctaaaatgagaaacacggtmatgaggatgaaatataaacgatygtcaggttcctcacaatcactcagtgaactcctcagagagtcagtgtacgtttgggctggccagacgcagtggctcacccctgtaatcccagcactgtggactgtgggaggccgaggcaggaggatcgttgagcccaggagttcaagaccagtctgggcaacacagtgagaccccatctctacaaaaaaacatggttttgttgttgttgctgttgttgttttgagacgaagtctcgctctgtcgcccaggctggagtgcagtggcgcaatctcggctcactgcaagctccacctcccaggttcacaccattctcctgcctcagcctcccaagtagctgggactacaggcgcccgccaccacgcccggctaatttttttgtatttttagtagagacggggtttcaccgtgttagccaggatggtcttgagctctgaccttgtgatccgcccgcctcggcctcccaaagtgctgggattacaggtgtgagccaccgcgcccggccaaaaaaaacatgttttttaagcatgaagtttgggttgcacytcagtgcctcctcttcccccattggtacagaaatgcgcccatgctggttccagctggatcagatccccttcaaggacatgtggcccgaygacagctactggtttccactcctgcttcagaagaagaaattccacgggtacttcaagttccagggtcaggacaccatcctggactacacactccgcgaggtggacacggtctagcgggagcccagggcagcccctgggcaggagaygtggctgctgaacagcygcaaaccatcttcacctgggggcattgagtggcgcagagccrggtttcatctggaattaactggatggaagggaaaataaagctatctagcggtggttttttttttttttttttggagatggagtctctctctgttgcccaggctggagtgcaatggcacgatctcggctcacgtcaacctccgcctcccaggttcaagcgatcctcccatctcagcctcccgaagaggtgggattacaggcgcacattgccacacccaactaatatttgtctgtttagtagagatggggtttcaccatgttgaccaggctggtcttgaactcctgacctcaggtgatccacctgcctcagcctcccaaagtgctgggattccaggcgtgagccactgcacccggccggtctctaacctttcaaacgttcttctccagacaccagcacagcctgccaggtcccgtccacaggaagctaccagatgtgctgggcttcagcccgcactgctgcacagaggtgggagaggatggagactctgtccccgaggtgggcagctggcccagggcagagacacacatgctcagtgccacaagctggggatgtgtcctcttaaaacccccctgcacagtgtgggaagctgaggctcggccaagggctctgggctaaaacccaggttgaacgcctcataggctagtcccctcccctgcccaactttcatacacatttaataacagttgttcacacatgtttattgataaaccgtccaaaatgtaggtcatgtgtaaacaattccagttgttgggtatattgggtattgatccctgcagcctcctaaagtgctttggacatgaactgacccgcaaagcaagggcaaaggcctcagatgcacagagctgccctgacatcccttggctcggagtccctgtgccccatgtcagagccctaaacctgtctcccctgcctgcactgtgtccggcagacaaagggcagctgtctgcacggtgaccccgagtacccaggacacggaccacgaggacccaatgaaaatgtcccctttcaccatgatcggcagcccccttcccacagccccgccagcccacaacccccctcccacggccccgccagccgtcctcacagggcaggcggcatctggcatctccaccagcatcacacgcagctgtccctgccagctaggcaaggccgtaatgaccggcacaagcttgggcttgggccgtgggcagcaggagggctggagaggcatgggggaaaccccgctctccctccggcatggggcctccacctgcagcagtaagcagcctctcagcccctgagcctggggacctgcccgggcagcacagggccagggccaagaagtatttgtgagaaggaaggtggcctccgccacccctgcctagcaggcctctttctgctgccctttagaaggcactgggtggcagaggaggaaggggagggaggtgttccaaagccagtgcccacccctccacagagccaaccccagggcacacaggaagcagccaccacacgtgggagacaggctgccctcgtcaccgctgccctccagcccccccttcaccctgccctcctgaccctcccacccctgccttcctgcccccccaccgccctcctgccttcccacccctgccctcttgctctcctcacccctgccctcttgctctctcctcacccctgccctcctgctccccctcacccctgccctcccttacccgttctcctgctccctcctcacccctgccctcctattccccatcacccctactctcctgctctcctcacccctgctctcctgctctctcacccctgcccccttgctctcacccctgccctcctgtcccaacgcctgccctcctgctccccctcatccctcttctgctccccctcacccctgccctcccttacccctgttctcctgttctcctgacccctgccctcctgctcccccaactcctgccctcctgctccctcctcacccctgccctccagccttccacctccatcctcagcctctggacatgaggaccctgagaccctgctcttgaagtttccaacacagggagatgccgccaggtatgtggcctctcatacactcactgaccccggagtccctgccaggaaagctccttcagaaaagctcattctgaagtcttgctcaatccttgggggctgtgtcaggagcgcgtgccttgcctactctggagacacagaggccccagcacctgatgccctccacgactccccacagcctctatggtcctgcagctggacaggccccaggaaggtgcggggtggacggagaggccttgcagccttctgcccacacggggtcacgcttcatggctcgggtgtcatggtgccattcatggcaactgagaacctgtctctgcagaggggcgtcagaaggcagcgcagcccaagactcgggtggactagggactcacgggacagcccacccatcgggctccaaagggaacgctgccctctgctcatctggccagaaggaagcagcccacctcacagcaggaaggcagcagcagaacccacagggcagggcaggctgggcccgagccccacagccaccgagtcagcacagcccacggggccagaaggcacggccgttccctctggccggctcgcagtggacgatggatcacctgcctgcggggcacacacaggagtcccctctccatcccacggccgtgagctgcccgtaggtacaggcggaagggaagcaccctccgtgagaggagtgaacgccccagaggccagtgagcatctgcggagcggagggacctcggaaaccctggagcccggcgggcctcttccagcacccctccccggccagggaggggcgtcaggctccggagaagtgcaggggtccactgggctcccatgtgccttccacaaaaggggttcgggcagaagcagacccaggcctgaggcggacagtccagccccacagagctcaggagaatggccttcttcatccagagcagggaaggggcctgaaagaccactggttccctctgtgagcaggtggctgggccggcaagtgcgtgacgggaggctgggaggagggctctaggtgcctcagagaaggaaatccacttaaaagggggctgtccctcctctaaagcctcagctggaatggaacacgcccccccacgcccccacctgtcctctgccagcccatccagcctcagtgccacacggtgcagaccccaacactggccaccagaaatcaagggagtccaggggacgagaacacagctgctgtagcgcccactctcagagccccagctctccgtcacgcctttgtcttccaggcctgggcacacacagggtcatggtgtggacacaggcacacatggggtcatcatatgggcacagggcatgaggccactggaccctacaggccactcccagaccagggctccaggtgttgactgcagcaatttccctagaaaattcaccgtgcgtgccccacgcccaatggccctccctcccagcctcagcaccactggctgtcccctcgctgtccgtggtcagtcccatgcctgggctgcagggcagccctgccctctctcctcggctgaccgagcaccatgatgctgcccctcccgactgttccagcacctggaggccctgcctccacgctcccccaggcacaatctctgtgagatgagagatccctgcctccccgcacagctctgggtgtcaggaggaaaccattccagagaaccccaccacctctctcgaccaggctagcaggccacagggcgaaggacagtgtggcccagctgcccccatggtccacggatgcgcctcccgacccgcaggcgtgagctcctctgctccagctgcagcacggggcgtggcggggaggggagctgccgtccaaagggaattacaccgggacacaccgtttggaaagaggttttagtgcggccgcagggagcaccacctcagcctcaggcgctagtgaggacacaggccgtcctccggcggggagcacggtggggtcagggtgctgtgtggtcccgcaaagaggcagctgagcttgggcctcaggtcgttccacaccttgctcatctgaaagggaagcgaagagaacaagatcagcaggcggggccggggctcctcctcacgctctgatcccagttccttcgcctgccagtgacagggagggaggggccctcaggtgcgccagctcctcaaacctctggcagaaccagtgctgcccatcctgcacagaggaagcccaaatgaggagtggaccagcgacatgtgacctgtggtcacagacacccacgcttcgatccctgcacccaggaccaaagggctgcaaatctgcctgccgtggaatcgtgagaaacgttactatcgcgtcactgccagtacatgctctagctgccgtgcgggcactggcctcatggaagccttggcaggtcaaacaccaaggccagcctgggcaacacacggacaccctgtctccacagaaaatcagaaatatgagtcggatgtggtggcacctgcctgtggtcccagctactcgggaggttgaggctgcagtgagctgtgattgcaccactgcactccagcttgggtgacagagcaagactccacctcaaaaccaaaaagcaaaccaaaaacacaaagaccacatccaccaaatcaataatacccaaaccggaatgcaaacggcggccccactcgccaagcacttttggaaccagggcaaggaacggatgctgtggatgtgaggaggggagcgcggcagtgaggcaggggtcaggccaagacctgccgtgcaggggctcaggtggccagagaagggcagggcgcaccctgggggcctgcaggggaggctgagtcactggaccacagcgcacacagcatcacagggctggaaattcctcaccaccacaataaaaaacctggtaggactggggttatggcatcatgctccgggcgcctgttggtcccattccttcactgaggacacacccggccactcacatgtccaagtccaacctggtccctgagaccctggccatctcacagtgatgctcctaacacggcggctgtctaccgcctctccagccccaccacggccgcctccagcctgccattcccaaagtgctggacggcacccacggcaccaagcacctcccggggacagtgtggaatctcgtgaccaccccagacactcggtgccattccacacacaccacagaccatggcttgaaagctacttgcagctacttaataaacttaatttcagccgggcacaaggtgctcgcctgtaatcccagcggtgctgcagtgagctggccaccagaaatcaacggaggcctgtcccaggaccttgggagcgtttcttctcccaggctgaaggaaccgccatctgctctggaggaagccggccagggctctctggaagaacagccacctgcggcgctccgaagcgctagaaaccttctctcagccgcagggtgcgggagctctgcgggctttacctccgacttctcaaatccctccaggaggcaaactctccctgtctgctcctccctccgccccccaggaatcacagggacaccctcacgattctgattttggctacacaggagactagaagatccgggcgagcaccgtgttccaaggcccatgcggagcccaactccactaaagaacctctctagggcggccggccaccgcgctgccgggcttgaaggaagggcggagggacaaagaaaggccgtggccgagacggcggccggggcagggcggactcacctccttgtgcccttggatctgagagttgacgaaggcgcggaggatgtgggaggtgaggggcaggtagacgtggatgagctgcgtctcctggtgcaggcagtacagggagaagtagttccgcagctccatcgtctgaatcgcgttctcctgctgcggagcaaacagccgcctttcgcacccggcccagacggcgacgggagcaccaaggcccgatcaccagcgtgctccctgagccagggcggccccttctccttcagccttcaccaggcatttggaaggtggcgaggtaagagagggccggggagggagcaccgtgcagggagccgcatcgctctgggcacgcgggccagctccctgcctc

SEQ ID NO: 94219 - DNA, 69757 bp, Homo sapiens
ctccctctgtgcttctcccagatcaccagggggagcaaggccaagagcatgagacgactgagtggaggaagccctcatccccaccactgggctctccaggcaggaattggatatgcttggactcacagcaatctagagcccagtgctttctggcttggggtgggggtggggtgaggggaggggaggacaagggggaagggagggtgtctgctcccaaaaagctttgagtctatccctatgccttcccagaaagtttacaagaggtagatatttccctgacctatttcagtgcctttaggagtcaggaacaagggacagatgggtttatgtgagccttctcatcaaggtttaggaagtaagctcatagtttgtttacattttttttatatcattgttcttgcacttgaggcaaggtggctttgaattcagattagggcacaaatctggctctctgaatctatatttccctgctataagaaggagaggtccttcttatagggttgttggtgagaattcaatgaaacagtgtatgtaagaatgataatagctacagtgtgtggaccagccactatgccaggcactacataatacataggggtatgtacataatttctaattttcatatgaagtacctagtatgactcctagcacatggtaggtgctcaacaaatatttttttcccaaccttcccacctctcccaatcccacatccctgttcctgagtatagggagaagtagagcctcgcttggaatgagggagactgactctaggtcagaaaaaagactacgggttttctgagggactcctaaagcaggttttgtttgtttgtttctgaagcagagtctcgctgtcacccaggcgggagtgcagtggcacgatcttggctcactgtagcctctgcctcccaggttcaagtgattctcctgtctcagcctcccaagtagttgggattacaggcattcaccaccatgcccagctaattttttctgtttttagtagagacagggtttcaccttgttggccaggctagtctcaaactcctgacctcaggtgatccgcccacctcggcctcccaaagtgctgggattacaagcatgagccaccgcacccggccctgaagcaggttttatattgtagctgggtgcattctaaagtgggaccaggctgcttcccctctccagaggtcttcccttcctcactcatcaagtcctgcctggcagtgatgctggcacccctgccagagtatctccaagtgctactggcttgctcctgagcagaggctctcagcccatcggggaaggacagagtagggcagggcagggaagtgtctgctccactgagcagcccctgcctgtagcccagaagccagagttgaccagagcctcttattattccaggcaggtctgtctgcagtgctgcagcagcctgaagccctagccccgggcccctcctgtttcctttctcccatttttatgcatcacatcacattcaataggagcatttagtagcggggagactcagggggtgagttcctttcatattttcaaatataccctactctataacctatacaaggtatcactctttttcctcatagtttggggatgtatttcttctttagcagcctgggaaagctaaaagtaaaagattccttggacaaaattggaggaaagtgtgtctgactagtgtttacactttggtgacttaggttcttgtctctggcagctcctcatttctagaggcttttttttttttttttttttgaagtcagggtcccacttggtttgcccaggctgaaactaagtgatatgaacacagctcactgcacactgcagcttccacctcccaggctcaaatgaccctcccacctcagcctcccaacttgctaggaccacaggtgtgcrccatcatgcccagctaatttttgtattttttgtagagacagggtttcaccgtgttacctaggctggtatcgaactcctgagttcaagcgattctcccgcctcagccttccaaagtgctgggattacaggcaggagccacggcacctggcagatgcctgccttttaaagggcctcttagaagcttgccagaaaatgaggaggtttaggctcaagagaaggagcaaagtgtaacaaaaagagcaccaggcagtcaagaccactgacttgctaagaccaaaccacttttttatctccctgtacctttgtatcttcatctgtaaggtgggggtcacagctgtcctaactagaattgatatgaccaatgctttcacacgtcatctacaaattatagaacagatgttataggaatttaggaggaaaaaagtaaaatgtcttaatgatcatgtaaagcattatgatttcttgccctaggaggaagagatgagagagttcgctcttctatcctatcatctcttaggcttgcaaaatattagaaaagaggagggagcacataccttaccgagaatgccccaagccgaatgactaacccttacctgaaaagaggtagtacctttcaggtgtctgagcagttcatttgatgctgaggtggtgtgagcaccttcagattattctttggcagttgcctaatcagattaggggccaggcaagctcagcagttgcagagaactcatactccggagagttcaaaactcagacagaagtggggacgtcatgatatgtttcctagtattatagcgatcccaccttaaacctcaggccccaactctgcactgcccttttgactttgtgccagcagcttagcgcttgacctactctgtgtttctctagataagcctgaggcaaacaaatcttttcattcttttccacatgtgttcttcagccccatgtgttctaatcttatgcgaccttttccatcagttgcctatggaagtggaagaatctctccgctttggtactgtgaaaagaggttcaaagtaaggaaggaattctgccaggcgcagtagttcacgcctctaatcctagcactttgggaggccgaggggggtggatcacaaggtcaagagatcgagaccatcctggccaacatggtgaaatcccatctctactaaaatacaaaaattagctgggcatggtggcatgcgactgtagtctcagctacttgggagactgaggcaggagaatcacttgaacccaggaggcggaggttgcaatgagctgagattgcgccactgcactccagcctggcaacagagcgaggctccatctcaaaaacaaacaaacaaaaaaaacacaaaatattagctgggcatggtggcaggtgcctatgatcccagttactcaggaagctgaggcgggagaatcacttgaacctgggaggcggaggttgcagtgagccaagatcgcacgactgcattccggcctgggtgacagagtgagactctttctcaaaaaaaaaaaaaaaaaaggaaggaattctgactcagactgtcttttctaattctcaagagacccaagaccctatatgctggtggttattgctaatggttataacctagctaatggttattgttaatgaagctgccttagaattttccattcttttggtggggtgggggttccctggcaaggaaagatggaagggcacatggagcttattgttcttcttctacttaaagggcctaataacaaaagttcattaagatcaaattaggcggctgggcgcggtggctcatgcctgaatcccagcactttgggaggccgaggcgtgcggatcacgaggtcaggagaccaagaccatcctggctaacacggtgaaaccccgtctccactaaaaatacaaaaaattagccgggtgtggtggtgggcgcctgtggtcccagccactcgggaggctgaggcaggagaatggcgtgaacccgggaggtggagcttgccgtgagctgagatcgcgccactgcactccagcctgggcgacagagtgagactccgtctcaaaaaaaaaagaaaaaaaagatcaaattaggctttctcccatcacttaagtgtcctattccagacactggatacctttcatctaagatttccaagcactatttctataattccattcctttatcactttcttagggtggtgcgaaaagacagggcccattctctacccaactaaaggtggaaggaactgagtcctgagaaggctaagtaacatccctgtcttcatgaagcaaacattgtagtgggtgaagacagaaaaggtaaaatcctctgattcctagttcaacactctatcagcattgttcccaacatcctcttgaaaggttaaggagttctacttaagggtcaagttgggtttcttgctactttagcccttcccacttcttccaggcttggaggagaagctgaactggggtgaaaactctgtggtcctgcctgtgcctataccagtctgaatgaagggagtttgacacattgcctcaggttctttgtggatcttcttgtttcccagataagaagggagtacgatattttaaaaacaaatagagccctgctttcttaactctttgtaagtcagagtagtgctaaaaatctatgtggggaggaggacgcaaagggcaaattgggagagggaggagtataaatcaacctgcatccctgtggaagcttctgggaagaggattgtcaggaatcggcaaagactttggctacatgtgactttggaggagatcattgataaaagaatcaagtcccttatctgatggttcttgtgcttctttgttcaccttctagaagtaagtgtggcatctatttattacagagaggttggccagagctccttgccaccccctggtaattgaagtcgtcagtggggactacgtaaccggggctggggtcccatgttctggtgctgtgctaagagtcccttcacatttaaaaggctgatgtgtggcagtgacacctgtcagtggcatgacacacagcggccccactctgaaactgagaaggggcctcaggataagttctcttcccaccttcagccctccgtatcgtcacctacaccacaccccctagttagcatgcgtgagaggtaatgcatctttctgaggggagaaatgctggcctctctctggtgcctttattgagctgatgtgagactctggtgctcactcacaggctagcttgtctcccttgctaaccttgctgtggtcctatcctctatctgaattgagaggtatcttatcgctcccactccagagaaactttaatgctcaggcttcaaactccctatcttccctcctcagaggtccttctgtcccctttactaaaaaaaaaaaaaaagttcaccctgcgtcaccaactgccaaagcattttactctcctcttctccccaaaagcctcttggaggagggtggagcttagcctcagaacaaaacttggtgccggccaggttgacacctgcacgggctgcagaatttccgtacacctggaggctgagtactctaacgggctttggaggattttgacatcttctatcaagttgtcatttccatacacctggaggctgagtactctaaggggctttggaagattttgacatcttctatcaagttgtcttccttgtgtgtaaatgtgtgtgttgggagtgggaagagtgtgggttgtgggagaggaaggcagactgacaggccacccttcagatcacttagatctgaactcctttttctgacctcttctcatcttttatagataaggtcagactaaaggatcctgtcacaggtccctcaaatagacagggaaaacattagagccatcagaggtcgtaaccatttatttccaagtttctgaagctgtgggttttatgttgcttggttgggagaggtgagacgtgaagactcgggtattgaaattactcctctacattggagtttacaggctgcaggggcctcccaggaaggaacgggcctctcttgagtcagctctctaagctcaggcctagctatcagttcagctcagatctcaactgtcacttaaacccttgtgcttagactgggtacctcttgcccttgcagatgctggatacttatggytgctctaatggtttctttttgtctatctttgaacctttattccagagatccagttgtcatcggtatccaggaagctctcctcttcctcctcctgacgtctacyactacagttgctggttgttgctaaggttgctgccatggtaacatgcacatcctgtttacaccttcatctgggcaagttggtctaagctaggaacctacctaccctggacaacyactatcatcaccacctggggacaccaatcatcgtgacacggagtccaccttccactcagttcccccatcctcttcctcctctcgctgccagacttcatasrgaagaaaggatctagacttcggacggctactcgggagcttattgcacaagatatattcaatctattccctcactgggcccccagagaagcaagaagtaggaagaagttgagacagggaggcaggagacactggtcagttgaagggaaacgctacatcttctctrgttgaggggcttggtaacagcaggcaaaatgacgaacccatcagaccgtgtcttgcctgccaactcgatggccgagagccgtgaaggggactttggctgcacagtaatggaactgaggaagctcatggagctgcgttcragggatgcactgacccagattaatrtccactatggaggtgtacagaatctctgcagtagactgaaaacctcccctgtggaaggtaaaggccatatcaggggtggggagttggaggaaggtggctagtgtttcaaaatattgttttcccagcttctagagaaggcacatttctggaggcccagctggtatatttttgtctggtgggaaaggtatggcatctgaagcactgaaaggagggsaggccatgaagaaccgtatctttcccagagatgatgtttagaaagtgtgctattctctaaagattattcttttctcctttttcttttctttctttcttcttcttttgtttctttttttttttttttttttttggtgagacagggtcctgctcttttacccaggctggagtgcagtggcgtgatcatggctcactgcagcctcaacctcctgggctgaagcgatcttcctacctcagtctgctgggtagctaggaccacaggcgtgtgccatcacacccagctagctttttagatttttttgtagagttgaggtctcagtatcttgcctagactcatctcaaactcctggacttaagtgattcttccaccttggcctcccaaagtgttgggattacaggcacagtgagccactgctcctgacccctcttttctcctttttctgtatcagtgtccagaaaggaggatatttatttttaaaatgtttatgttataaatgttgttgtcagtaaataatcaagtctgttcttctatatgtctgattataaaataatttaattcttccctacactgatcttacagtttaatgaatggaggaaggaagggtacaaaaaagtgaataagtccagctgcccaattgagcacttctctattgtatactgttagaaatgggatgataggccaagcaggtgggtggctcacatctctaatcccagcattttggcaggctgaggtgagaggatcacttgagcccaggagttccagaccagcctgggtgacataataacaccccatctctatttttttttttttttttttggagacagagtcttgctgtgtcacccaggctggagtgcagtggmatgatcttagctaactgcaacctccgcctcccaggttcaagcaattctcatgcctcagcctcctaggcagttgggactacaggtgtgtgcaccaccacgcccagctaattttttgtattttagtagagatgggatttcaccctgtkggtcaggctggtctcgaactcctgacctcaggtgatctgcctgccttggcctcccaaagtgttgggatgaggaggcttacaggcataagccaccaygcccagcctctattttaaataaaaagaaaaaaaaaaggaaatgggatgctaaatcacaaggtatataactgtacccatcatatctttggatcactcactgttttgtgtcagggaattataagtgattttttttcaactctgctggatacacttttaatgtagttctccttaatcttttttgtttgttttgttttttgtttttttggtttttttgttttgagaaggagtctcactcttkttgcccaggcaggctggagtgcaatggtgcaatcttggctcactgcaacctccacctcctrgattcaagcaatyatcctgcttcagcctcctgagtagctggggttacaggcatgtggctaattttgtatttttagtagagatggagtttcaccattttgaccacactggtctcaaactcctgacctcaggtgatccgctcacctcaacctcccaaagtgctgggattacaggtatgagccactgcgcccggccttaatctcttcttaaaagctaaaaaaacttaaaagataatgaaaaattcagcttcaggctttggcccagcccagttgcccagtgtgccatggtattatgaaattttgcctcatcaaaatgtagaaagaacaaaaggaaacttgctttttcactttagtctggttttagcatctctgtagcagattcttacttggccctatacatctggcagttcatggttgagtagcatgagatggagcaaagatcttgtccattaggggctttcagyctcatgtggtctcctatttctraatcttcctcagaggccacagcatatttctcaccaattctaagaagttgttaccctttgccagtgctgtattataagttagtgacttggagcctagactctttaggatgaaaaaagagaaagagagttttacatagatatctatacctagtttatgtcttattttctttrcaacctaagggagcttccctacctgttttctttacttctagaatttggtttcctatctcataggctttgagttcaaatgatagctccaccatttactaactaagtagccctctacagtttactcagcctccctgagtctgtttcttctttgaaaataatgttaataacacctagcccatagagttactgagattaaataatacatatacagtgctcatacttataattaggtgttcaatagattagttttctcagattaaaacagagtccatgcatctgtagatacttgccagaacatgggtgcytatggagtgcaatgttttgtcctatctggagaggttactgtgtgtgtaactgcaactactgtccatttcatttgctcrcttcttaatcacaaaaaaaaaaaaaaccctgggtaaggtggcaatatctaattgctttcatgtggctcagtctttgccttctaatggtagtccttaatcatacccctttgggctctgtctacttcttgccagctagatttctttattcagtcacttttacagccgtactgactgctgagggtctgttcttaattatatcttcactgagattatgcagtactttacaaacacccatcagaatttaaacaggatctttctttttcccttcctatgctgttcttgatccctctggtcagctgtctgtctcacaaacaggaactcgggagtccaaagaagctggaacctagagaactcctgacagcaggattcaggctttcctccaattttccagatcccttcccagagctgccactgtttactttctgattcccagagagcttcctttcccaaaggccaacatatattctactttctgtcaacattggatatcaaatgttatagacatagctaatgctcttggatcctttcccagtcctggtttcagccccttccaatggcaagtgcttccctcgttacagcccctggccatgcctgtagcctaggactcctaacactggcacaattttctactgccatgtactgcttccttagatcacaaatatgtgtcctggtgtttttctttcttttctttcttttttttttttttttttttttttttagaaggagttttgcttttgttgcccaagctggagtgtaatggagcgatattggctcactacaacctccgcctcctgggttcaagcaattctcctgcttcagactcccaagtagctgggattacaggtgcacgccaccactcccagctagttttttgtatttttagtagagacggggtttcatcatgttggccaggctggtctcgaactcctgacctcaggtgatccacccacctcggcctaccaaagtgctgggattacaggcgtgagccatggcatctggcctttttttttttttttttttctttatgagagatggggtcttgctctgttgcccaggctggtctcaaactcctggactcaagcagttcttctgcctcaccagtttgtaktaatgtaagagttaccatagggcttgttctggaactggggagacggtgttggaaaacaacctttccattagtaatttttagtccccagtaccaacagtgacgycctagtgtgtaagaagaataaagagataagaaaaggagaaaaaaataagaaagaaaaagaaagaaaagaaagaaaagaaaggaagaaagaaagaaaaaaaagaaaagaaaagaagatatagaacagctaagacataggagtatctacccaggcaagggtaatgctcacctgtttagttagggtaggcagacaaaagatccccaatatgctcatcctataaaaagccagcctgttcatggaaggccacacagcctgacagcctaggagaattttgtcattgtgggaggtcccagtggaccaataataagaataaagaaatgtacctggtgcttgaattctgctagctggaaaccaaggtgaaagtgaagatcagagatattgtttcctaaaatataacccttttcctttattttctatggactgatagcatctttagtatagattgacagaatttttttttaaaccatagcttttaagggggcttatggaacttgaagtttattacatttctgatactaacatggttttattatcatagatttacacaattctaaaggcaggtgggacttaattatctcttttggctggccgcagtagctcatgcatgtagtcccagcactatctgtgctttagctaagatwctctgtgagactgctctagcataagaagcatttagagcattaatggagtataagtcagaaggcatgaaatattccatcccattctacctggtggtaagaacttaggtcatttaaaccctttagcctggagagagggagagagraagagattattattattattattattattattattattattattattattattttgggatggattctcactctgtcacccaggctggagtgcagtggcatgatctyggctcactgcaacctccgcctcccaggctcaactgatcctcctgcctcagccttccaagtagctgggaccacagatgcgcgccaccatgccgggttaatttttgtattttttggtggagatggggttttgccacctctacctcagcctcccgaagtgctgggattacaggcatgagccgccactgacccaatgtttttttgttgttgttttcaattttatttttgaaacagggtcttgctctgtcaccgaggctggagtgcagtggtgaaatcatggctcactgcaacctccacttaccaggctcaagcagtcctcccaccttagcctcctggttaactgggactacaggtgtgcaccaccacgcccagctaatttttgtattttttttttgtagagacagggtctctccatgttgcccagggtggtcctgaactcctggcctcaagcgatctgcccaccttggccccmcaaagtgctaggattacaggcatgagccctcatgcgcagcctcagcccaatgttttgatastggcttgtgttccttgagtatacattagctagttagagtaagaggagttgccccagtggccaagagttggttagacttaagaaggcttggagatgtttagctacatggccttcagcaacaaccagaaataaggctgagagcatgagccaaaaagagaagaaaatttagggcaacaagaaagggtgggggagacataaaagagaatacatgtttacatcaaagtaactaaagatttcagtctttatgtctgtatataaacaaaagcaaagatgcaggggtgagactggagctcctgggcaagctgtgttgccttgggtttatcaggagggacaatctgagcattttgcacaatggaatccttcttgtttgcttgcttcgttccccattccagttttttccccctccttttattgtctcttctttccctgtcccattcccacctcaaccaatctttccartccccaaagaacagagcagtttggttggtataggctagaagatagccttttaccttctgtgtggtttcctgtggagtctcatggcctcgtgagtggaagaagctttttgtgaatctgggatgaaaattacctgtggcttaaggggaagaaggaagaggtattttccttagtctcaatacccttttgtgtgaaggaaaaagggatggtcctggcggcctaggtagaggttatacgtgttcttttttccctgtagaattttgcacrttggtccttagctaygctatcctttttaggaggaagaatggtgttttctgaggaagagttaggccagcccttggaggcaaggtctgggcccagaacagaatgggaaacaaggggagccttgaataaacagcaaattattaactgtaggccttctttcaaaaggctgaaggctattttggttgaatttggatctaaaagattgttggtggaactttctgttttatgttccttctgtacccttctacttcttttctcctctgcagagttgaaggcgtgacagtgagatattgagggcctccaattctttttcracaacattcaactaatacttaawaactgctaggtgctagggacacaagggtgaacatgacaggtgcagtgcctccttccatagagcttacaggctaaaagaagatgcatatgaatgaaggcaatttcagaaatcttgccatagggcttcgatgaggaagagcagcgtctatgggaacacagtgtagggacctaagctgaaggcattgcaggggaggggaagggggcttagagctggagacagcacacctgtatcatttagggattacccagtgaagctctagcatggccacgctctatgatcattgctaccacctgctgaatattcctggcataagatgccagcatttttgccttccttaattactgggtagttactaggtttagggagctgagattccttggggagtaagtggcaggcgggaaaaaaaatgtgttttaagacggccaacccaaattacaattttgttttattagcttgaggatttagatgaacgtctatcaccttaagatctctggggcttaactgtgttcccgtcactgtgccttttgagggcagtggcatgttttaccargaattgtccattttgctacaagctgagatgtactgggattgggctcttcctcggtgtagcagattgaaatttctagtagtattgtcaatctggaaaaaattgagtacatatcccaagtaaatgttcacctacaagactattgccttactattaatacatctaacacttttatttacataataagataggcaaacatatattttcctcactctaacagatggatgcatgccccccgcttagagaccgctgctctaaagcacggtggcgttagggggatgtggaggactaggtgagtgaagatgggatggaacagatgtgagaggaagatgggcaactgggttctttgagatttttcttccctatctttagagcttatagtctgttctggaatatcaatttttaggagctcctccacttgaggttagaagcataacctctattttcctctttctttgtgccctctgccctgtagccatcatctcttgccccaactctactaaggatggcaaataagtgaccctaataacagtgatctgggcatggcctcagagattaacattctgtggtccactctgcctaccaaattttgggcagatggattagcactaactaattcacgatgtgagaaggactcaagccaaaagtgtcctccctctgcccctccccatcccccaccacagggaactccactttgcatcctaggaattccctgtctggtttgagtttcatgcctagggctgaattaggcttcttgtaggctgtgggttctctcttcctagcccagcccaggctctgccagttcttttctacttagccctccttgcctagagctgggcttctgggttcactgtcataatgctgtccagctggggtcagagggatcttcacgaggagagtagctaaggcttccccaacctggaagcaggaggcttccccttcctgctttctctcctggagccctttatgctccattcctttgacaactcagcagcaactgttgcaagttttttgggggtctgatttggtttttaaccttctcattcttggcttacattggaccattagctgttgggaagaaaaatagcattccctccttgggtgaagcagatactgcatctaccgaaagtggggctttcattcttattatttagctccaaggtgggaatatgacaccagatggaagcacattcatgaagtacagaaggtggcagagtggcagagcagaaagctaactagagagctctagggagacttttttccctgggccacagttgctgttttcaaaaaaaggccaagagcagggggcgggataaagggaagcatgccctgaggaagcggcccaccttgggaagggttttgctgaccagaatgagaaaagaagcattgttctccaagttcatcatcctctggctgtgaccttgaatcractgctttatctctaggagctggaagtctagcagatagggagcaaatctccaagccrtgcgtgtattaaactggaggtgctgaagcagggaaactgctgtatactcggaagagtagcattcggttattagccagagatggctagatcttgcatggccctattttgattttaagttactcctccccctcagtccccaaatccagggttgttggggttttttaaaattaattttaactttttttttttgagatggagtctggctctgttgcccaggctggagtgcagtggcgcaatctcagctcactgcaagctccgcctcccgtgttcacaccattctcctgcctcagcctcccgagtagctgggactacaggcgcccgccaccacacccagctaatttttgtatttttagtagagacggggtttcactgtgttagccaggatggtctcgatctcctgacctcatgatccgcccgcctcggcctcccaaagtgctgggattgcaggcgtgagccaccacacccggccttttttttctttttttgagacagggtcttgctctgttgcccaggctggaatgtagtggcaaaatcacggcttactgtagcctcaacctcctgggctgaggccatcctcctgcctcaacctcctgagtagctgggaccacaggcacacgccatcatgtccagctaattttttttattatttgtagagacagaatctttccgtattgccccggctggtctcgaactcctgagctcaagctatcctcccaccttggcctcccaaaattctgggattacaggcatgagccaccaaacaaaacccaaatccttttaaggaaggacttaaaaggtattctgctgtctgtccttctcaagttccaaaagaggacagccttcaaatcaacccagagaaaattctccctggtactatatgagtgggagaagattctgctgcctcctttggcaaggtgtcataactcagacagctgggaagtccctcctgatgtctaccctagccccaccctttctggggctgagctggttctgataagtagtgcctctgccgatgtcgttggcccttccctgctggagctaagccactgagggttgggctgcatttctcctcccaggccctaggtcctgcacactcatggcagacacaaatattccactgctgtttattctatgttcccacccagcctgggcaggggccgtgcacctccccagcatggggtgggggtgatgacttcacagctaaacattctctttgcctctcccagctcatgtgttcagtctggttcatagggccagaagtactcccactctgggtggggctttctctctcatgttcttgaggacaagatttcccctcagtttcctgaggaatttctaggggaaacccttttcctgtgtttccagcattctctccctgccaagttttccttcccctctccaggaggttgtgtgagcatctgagaaaccactgcagagatcagggccttttagagccttttcccaggctggacaagtatttgtgtgaaattacagctgctgagatcagggcctgaaagactctctagggcagaaagaattggaatggaaagcccaaaactggggattggccgagctcccagtcccacatggctttcccatgcctcaccacatgtcagagaggattcccaaggctactacagctaagagccttgacctgccccgccttgctgcagggcatactgggaactgagacagccacttgacttcttaaggttgctattgtacaagctcagggtgacttaaggtggaacacatagatgagtagaaaatggcaaaaaaaagaagcaagcaagtgactttgagagcatttaggtaagaacaagccctgactttttatgttttccatagtgtatgtcacttcatttgcttgggtccaaaaaaggccataagaaaggttttattgagtacaaaattcataggtttggactctgatgaacctgatggcgatgttaccatccctgaggccaggaagaaaaaagacaggactaatccaccccaattgtagacagtgggaacagcgctggcttgcttagaggtacagaggaaagcagcatgcaaccctgccccgtggtgaaggaagtagggtggccaaccatcccggtttgcccgggactgagcggggttcccaggaggcagaaacttcagtgctaaaacctggcaagtcctaggcaaaccaggacaagttagtcacactagattgaagcctcagctgagtgcagctgcctccatgtcccagcgtcctctgtatctaggttggcatccagtggccctctgtggggtggcatagactctgccacttaataagctcaagtagtcatacccctgccaggccttagtttgcttctatgtcaaattgggttaatagtagctaccaggtaggggtttgtgatgcttgaatgagaaggcatgaatgtgcctggtgaggcatctggcacatagtaatcacttaaatgttagcaatcttagttatcactcattcattcagttcattctacaaatttgtgtgtgtacaatgtgctgggcaatgctgtaggcctgaggaacaaagataaaaatcctgcccttgtggaggaggtggacaaacaataaatgaatgtgtcctattatatgctaggtgagaagacctgtggagggaaatgattgagcaggatgagggggatcaagagtgccaggtaaatacagtggtcagggtaggcctcactaaaaagaagatgtttgtacaaagacctgagggaggtgaggaagtgagccctctccaacaaagaggaatctgggcagagggaacagcttgtgcagaggccctgatgtagatgcctgtctagtgcgtttagagaacagcaggcaggctggttgggccagatctcagtgaacatggagaaactagtaggagataaggactggggggctgggggagtcataagggtcctggaagcccatcattaagtccttggtgcctagttttactctaagtaaaagccagagggttttgagcagatgaatcgcatgtactgccttggatcttaaaaaagatcattctggctaatacattgagaagagactaagaacaggagagggagggtggaggcaaggagaccagttagaagatgattgctataatccagatgagagaggatggtttagaccaggatgataacagtgaaaatggaaagtgattggactttagatatattttgaagctgataggatttctcaactacatgatataggagatgggggctgggcatcaaagatgattacagggtattagcatgagagcagagagggacaggtagccctgttctctgcccctcatatgtccctctttttgggagggagggtttcattaggctattggggtgcaccttatgatctttaatatctgatgtcttggtttgccctcataatcatctactaaaccttggtaagaaggaaagggcatctactccctttacattgtgaatcctgcttttttgagaagcgtcccaggtagcttaacaaattaccagcactcctgccagcaagcctggctctccagcacagcagacccaacttggcacagccttgccatctctggtccctggggagaaaggaccagcaaggccctgcccctttggcaagtctgcctctgcctgtctggggctaaagattccctgcccagaacactcctttcccaggctctggctttccctcctactgggaacctgacttctcaggctggtggggcagggagtctctggggagcaacccaatttgcttctagaggtttggccaaacctcacagctctgcggggctcagctgtgcccctaagctggaggccagggtgatgtgcttgggcactgggagtcaggagaccctggataagccatcaggcaccacttccctaaccagcccctgtgtctctctcctaagcactagcaagtgaatgtggtctcaaaagagggccctcacacccctaactgcataggtgtggatgctagttcatcccctgcccccccactttcatctcccaccccccacatctaccttcccagacagatgagtatcttatgtatgtctcctgatgctttttgttttataggatagggaaatggaggccatcccaaactctgcaaataatgctcccttgggtacctattttcccattttcaaaatctttatctgttcagatgtcttcctcaggtcctaacccaaatctctccttttgacayktaaggtaacactcctgggttcttttttgagacagagtctctctctcgcccaggctggagtgcagttgcatgatctcagctcactgcaacctctgcctcccagattgcaattctcttgcctcagcctccctagtagctgggattacaggcatgcgccaccacacccagctaatttttttgtatttttagyagagatgaggtttcaccgtgttggccaggctggtttcaaactcctgacctcaagtgatacacccaccttggcctcccaaagtgctgggattacaggcatgagccaccacgcccggcccactcttgggttctattcagtgaagattttcagtgaagagtagacatttgcctgtataccacgtctgcattccttcctcagcaacagaatagcccttcacattgactaaagtgtaaagaaggcctctggcatccaagtcctttgcctccgttttgtccctgcagcctccatcatccacttcttgttctctctgtgaagctcagttgaagttcccttcctctgattctgaccctcctcagctgctaaccttttttcaagacaaaagtcaccctaccctgcctctgggaaacccttcaaaccggcaaccaacagcttccagtgccaaaaccaggactaatttgcctcagcgtgtaaacaacttgaacaccaactggcattaatcaccatggtaggattgcccctcttcccttcaagggtagccccacctggggacccatgaaaggacccaaatataaggaaagcactgagaataattctgcctatctcttgtccctctgggaaagtgcstagagagtaggtgtggtatgtatgtggtgcatgttctgtgtgtgtgtgtgtcatatatctgtgtggtatgtattgtgtatgtggtttgtgtttggtgtgtatgtgtctgtatattgtgtataaggtgtgtgatgtgagtggtgtatgtggtttgtggtgtgtatgtgtctgtatagtgtgtgtggcatgtggtgtgtgtacacacaggtatgtaagcaaacgtatgttggtagggaggatgctgctaatcaagtactgcgtggcatctgaaaactttgtggccccacctttcttgttctctttttattcaatctgagtagtagtacttcccttagtacctacttagtccttagtagaatggtagtatctctcagtggtgtgtgtttgtgcctctgtgagtgtgtgtacatgcatacacctaggcacacaggtgtgtatatgtgtgtgacagaagaggggcacatgtgcttaaagggaatgcccacaagttatagtcttaaagactctgccctgatgctcccctaaagctcctggatcttagaattaggacacatgtgtgggctctgcctccatcttgcatgaccttgagcaaggagcttgttcttcctggcctttgtgtgtgagccaatggatggcagctcactctgcttttaaatcactgcagcatttacctgttaatatgacataaaagttctatgtgaatcccaagaaccactttaatatttaatgttctcagagctggagcctggggcatactcaatcagtagcagataagattttatgtctggttaagaatttatccagcttatacttgttactaagataagtgagtggtcccatggctgactagtttcattttgcccatttttagactgaaagttccaccctctctaagtcctgggcagattaggatggttgtctctaactggatctcatacttgagcaaatcaggaaggaaagggtcttttttatttattttattttagagacaaggtctcattttgttgcccaggctggagtgcaatgacgtgatcactgctgctcactgcagcctcaaactcctgaggtcaaaacaatcttcccacttcggcttcctgagtagctgtgactacaggtgcaccacatcatgcctggctaatttttgtcttttttgtggagacaaggtttcaccatgttgcccaggctggtctcgaactcctaaacataagcaattcacccaccttggcctcccaaagtgctaggattacagacgtgagataccatgcctggcctctttattktatttatttttgagacagcgtctctctctgttgcccaggctagagtgtaatgacatgatcatggctcactgccacttcaaaactgccttttatcattttccttttttcctacattcattcatccactcctatctccttttcaggtctgtctgggaaccctgcagatctggagaaacgtaggcaggtgtttggacacaacgtgatcccccccaaaaagcccaagactttcttagaattagtgtgggaagctcttcaagatgtcacgctyatcatcctggagattgcagccatcatctccctggtcctgtccttttatcgccctgctggtgaagaaaatgaacgtgagtgtcctaaacagctcagcgtgactcttatctgggttctttccaccaccrccaccaagcgcttagtattggtggctgacaggttatagcttaaaacatttcccccattatccagagtgggctttccaaaggaaaccaagcagtagctactaagctattcttccaactcatccttattccaagggttcctccccaccccaccctcaccctctgtcttctattaaatcctttttcggaatgtcaggaatcctctacccttttaagacattttatttatttattaattattattattattattattttaatggmatcttgctctgtcacccaggctgggtgcagcagcttaatctgggctcactgcaacctcctgggttcaagcaattctcgtgcctcggcctcctgagtagctgggattacaggcgtgtgccatcacgcctggctaatttttgtatttttagtagagacagggccttaccatgttggccagactggtatcaaactcctgacctcaggtgatccacccgccttggcctcctaaagtgctgggattacaggcgtgacccacttgcctggcctatttaataatttttacaacatagagacaaggtctcactatgttgcccaggttggtctcaaacccctggggtcaagcgatctgcctgccttggcctcccagagtgctgggattgcaggtgtgaaccaacacccccagccaggaattctctacccttatccaaccaacaaaaccctacatctcaaagtgccccctgccaccaattgtctggcatgatgggaaacagtagtgaaagcctgaccatgttgggaaccataagtgtgaccttacatgtgacttccctaaatttgatagtttgtactatttagtcatttgcctcttttggattaacataaatagttacactagtgataagacaatactcaatcctgctatcctctgatatcctcttccagccaacagttgtatttgctattattcacttttcctgactttctatcttggggtgattgtggaagcactactcctatttcttaatgtcaacaaaagcccttcagtgactatttctctcccttcctgggatagtgtgtggtcaagtcgcaactaccccagaagatgaaaatgaggcacaagctggctggattgagggggcagccatccttttctcagtgatcatcgtggtgttagtgactgcctttaatgattggagcaaagagaagcaattccgggggctgcagtgccgcattgaacaggagcaaaagttctccatcatccgaaacggtcaactcatccagctccctgtggctgagattgtggttggtgatattgcccaagtcaaatacggtgagagctccgtgtttcttttgcttaccccaccaccacccccawttaagggataggtcctttggcatgagggggctgggaattgctgaaaacccaaaaagataagatccaaaattgtattcacttctaggttagagtttaaagaggttgtgggaagccatttcagaaaggagtagctgaaactctgtcgcaagattgtcagacttgtaccctgtgtgtcttagggttaaaagtgtataacattcaggccatgrwaaggtgttggggatgaataagagtttgaatttataatgcctggaaagcaaccttctcccagattgtacagagctgaagacttgtaaagagtctccatktactctcggccattgctgtctagatagggcccatgggaacagccatgagatagggttgaaggagttggaggaccctaccctcagccagtctcttactatctccttcactgtccctccttcccctttgtgctctaggtgatctgctgcctgcagatggaatcctgatccaagggaatgatctgaagattgatgagagctctctgacaggggaatctgaccatgtcaagaagtccctggacaaagaccccatgttgctctcaggtataggccctggctgcccaagttcccatttacctccctgcaaacacctaggccacaggatccagaccctgttctctcctctgactctgtcccatctccttccctggggttcagctggggcaacagcattttggtgggtggaatacaaggatatcaggcagcctaaatgaagttttccatgaaacaagtgttataagggccttgaaggggctttgctggttgcaggrgtggcgggggcaggagggagggcttaccctaaagcggttagacacattttcctccttactcccaatttgtctggtctgttttaaatgcgcccagctcttgaccttttcctactgtgctaagcacatcattatccatggggtagggaggagtattttttcttctaagtttgtgtttcataccaaatcatgtctaggtattaaaaaacccattccttcccatcttctcctttcccgtgtagggacccatgtcatggaaggttctggccggatggtggtgacagctgttggtgtcaactctcagactggaatcatccttactctcttgggggtcaatgaggatgacgaaggggagaaaaagaagaaaggtaaggggcatctggaatgagattctctttcctctcatccccatggacaaacaaggaagcgagggagcagatctggwtagaaagcatggttggaagaatctgctgccatgaagaaagcagatatccaractccttgctgagataaagatgtaaatccttggctccagggagctctgatgaaaaccagatcctggctctaggctcccaaatcaggttgaatttgagccttgatttttatgtctaatggtagcttgtaaagggatgagttataaagcctgccctaaataaactggctaggtgctggtagccccaaatgccttccgtgtactccccctccttccccaactttcttcctcaaagatggggggttaaacgaaccatcaagactaagagaaaattggccagaagagtaaaatagatttctgccgaaactgtaggctctcaatggaagagacacacagctagaagagtaggaacagttagttcagtctttgccactcagttattcctgaaggaaagaataagagggagaaagaggagaagatactaaaaccaagtctacacgtttccctaagcattccttcttcccttaggggagagaaggtttctaccacttggctggagaatcatcttgagctgtttagtggaggacagtttatgaaaaggaaacaaaacacattctctcaggaactaaataattcatttctgcrgctgcctgcagatgaataagggggaagcttgcctggtgctgttgaagtaacacggagacacctttcaaagtctttgccatcaggcagaaacggttcaaacctctcacttcctaatccccaccccatttttccaagcaatgtgactcaggccaggagcaagagaaagcacctcaggtatgagtatgcactcacctacatgagcgttttggtggatatcccgaggattcatgacagcctctagcaagaatgaatgaaaacagagatgtgagcttcctttacatttatgtcccttccctgcaacccaaacactttgctgttgtccttctgggctctgagcaggaccaacaaattggatctcttaatagttactttgggtttcgaccccacttttttctttcttgttcaaacaggtaaaaaacaaggagtccctgaaaatcgcaacaaaggtaacctctccaactactcatttaccatctctacctgcccacactcaaaccagacctttccaggccatcttycttctcccttttcctctccataaatctgttatctgctgctgtggctcagatgcctcatcctgaggaaggtgcagagatttttggggtggtctcaaggtcctgatcccaatctaagatgggacaacagcaccctctgctgttggctcacagaatgtcatgtcaaggtttgtcttggggagtgtgtaggattgatctgctcttcctagggagctgaactctgcttcattgacctcagcctgatttaaacaccaacagtcatcagtttctgggttggaagacttcagggtcctcatggtggagggaggtggggtgggtagtccctgcaccgtcctcttgctagcttcctcataagtgtcctcttctggtctggatcccttctctgctggtcttctcaggggtgcttggagagagccctttctctgtatctctctccccacctcccttctttgttcttgccacagtctgttttcttcctcctgatctgatgtgtgtgtctcttttggtgactgtgttcacattctgtctccgtcttcttgtttgtgagtctgacagcagggactactcaggaagggtatcctaagcaaggggctgagccctatagcagtgaaagtggagtggtgctgggagccagcaagaactactgtcttgtgacgctcctagagatttgtttttactttgtaacccacatcacagcagtctttagaaataaagtcatcacattggaaaaccagagctaaacagaaataattctttaattttaggtctttaactcttcttttaaaagcaaaatggatttatatgtctctctttatccctgctttctcttattccaggaggtccctcacaccagcttcttccctcttccccaaaagacttaaccccaggtcccactctgtatctctctacctttgtcaggcagggaagaaagggaattttcttttcctatcctcaactgctagaaggggctggaaaataccctgggtctgggggtatgtgtttcttccctgacaatcgagagagagagagagagagagagagagagagagataaaccatttaacagagcaatcttgtgctccagaaacatctgccaaccctctccttcagcccctttctgcagtaaagattcactattttaagcactgagttccaggaaggatggttgttttaatagtgcttagtgacatgattaatccccttgctggaataaacctagcttgggactctgaggtagtaccaggaagctgccactgaagaagaaatccataccctaaaagcaccccagtttcatctaaactcattagaatattattccaaaggccctaatagagtgttgaaggcaagttccatgtctagcatgggttggaagtggtcggaactgatgtcagggtccaaggtatattccgggaaagagacaggaaggttttctggtttccacctgcctgccactcagtgctaccaccttgcctgctcacctgtcctatttgtgtgtacactccagcaaagacccaagacggagtggccctggaaatccagccactcaacagccaggagggaatcgacaatgaggaaaaggacaagaaggcagtcaaggtgcctaaaaaggagaagtcagtgctgcagggcaagctgactcgcctggctgttcagattgggaaagccggtgagtagggtagagcctcgttgtggtttatcaatgttgtcttggatcctcatcacttttatccccttctttctgcacygaccgagactggcagaaagaagctgaaacttcagkgtggctagttggggctaggcggctgtttccctrtctccgccactgtttggtcgctccctaggctttttcagagagaaatgttttcctgtgtgtaagggttaatggccctgagatctcttaatccaaatgaatgagaaacaaagagcatatattacagcaggggagatttacattagcaagaaggaagactttaataactgcttacctgtctctygctttgggttgtaaattccttaaagatagagaaggctgcagcttgctacaggcaattctctagcataggagtaggatctggctaagcacagagcaataaataccaagtaaggactggaggaagaaggaaggctgtggttacagaggctctctccagaagagaggtaactaaataatgcactctgcatatgaggaagtggcttctccatyacttgcctctacattttcctgtctcaccaccttctttcaatggagggggagaaaggggagtgggaagaagaaatagaagattgctactttagtggacatatctctcaaggaacagtctttttttttttttttttttttttttttttttgagatggcgtcttcctctgttgcccaggatggagtgcagtggcaccatctcagctcactgcagactctacctcctgggttcaagcgactttcctgcctcagccacccaagtagcagggactacaggtgcacaccaccaagcccatctaattcttgtatttttagtagagatggggtttcaccatgttggccaggctggtctcgaactcctggtctcaagtgatccgcccacctcggcctctcaaagtgctaggatacaggcataagccaccgcaccctgccagagagtagttttttaccactgtttattctctgattccacctttctgtttaccacaatcataatcagcacatctctgcactttatacagctgtatacaacttacctcgggttcttgttaaagtgtagattcagttcagggggtctggtgtggagcccgagattctgcattcctaataagcccccacaggatgccagcaccgctgattcagtttgcacacattggatggcagggatctatgctgcccaccatagcagccactcaccacatgtggctgctgcaatttaaattaattaaaagtaaataaagttaaaaatccagttgctggggtaaattttagttggtcacgagccacatgtgctagtagtggctgtcatattggacagcataaatagagaacttcttaagcgtcacagaaagatctattggactgagttggcctaacctcttcatgtccattctggtacccagctaattttaactactgtgaaatctcttgcatataaactatacatggatgagatgaattgcaggtgcagaatcaaacacacaggtttgaaacattaaatctaccccacctaacccttgtactattctcctaatccttgccttgttgttgttgttgtttgtttgtttttgagacaaagtctcactctgtcacccaagctggagtgcagtgatgcaatcttggctcactgcaacctccacctccggggttcaagtgagtctcccgagtagctgggattacagatgtgcatcaccatgcctggctaatttttagtaaagacagatttttgccattttgggcaggctagtctcaaactcctatcctcaagtgatctgcccctggactcaaggaatcccatggcctcaagtgatctgccggcctcagcctcccaaagtgctgggattataggcgtgagccactgtacctgtcccctgccttgttcttcttacagagtacaagctacctgatggctggccactagtctcctctgttgctttattttatatattaggccagtccaggaatagggtgaggcaagtcagatgctttccaccacctggagagtgagttccttaaattttgcactctcagtggcttgcttctccacctgagtcctggccctaatcaagcaaagaacggaagaatttgctttcattgatatcatcatctctagccttgcttggaggcccccgaatcatcaggcccttgggaaaagcaaaaaccaaaaccagataatgatttaaagcagagcttttcccaaatattgtgccacagttagggacagttgtccccagatattgattccatcagccctcaaagcatccaggcagcacccatggcaatcagaacccctaagccagtcggttttgaccttgagcagattctttcacgtactgtaatgtgtagggtaaccaaccatcccagtttgcttgggattttctcaattttagcaaagccccacatccctggaaactgttcagtagtctcaggatggtttggttactctaccaatgggccataccaaagacttcccagtactttcatttcctcatctttaaaaaggcggtaataataatgacctatttcacagggttgtgaagtgcttgcctggcccacagcaggtgcccacataagtatttactattattggcatcttctatgtgtgccgtgacaagagaaatcttgggaagcactgttctaagagttagtcatgcaggtgatacactagcaccatagaggcattgttgtaaacaaggtgtgaattgtccaacattcagaggttagtagaggagaagtcaaaattgataaactactatgaaatggacaagtacagtcatgacattatgaatcgcagggagagggtgggcrtggaataggatcatagaaagctgtttcaggaaacagatcaaccccctgatttatgaatgaggaatttgatctaggaaacaggcccagagagggtcaatgacttgtccaaagccacaagtcaagttagtgcagtgctgagaatagaacctgtgtctttgaaatacgaaaccactgtctgttccctatgctataatgtacaagcaacagagaatgggggggattttagtaagtcttcctggcgatggtggttttaataattggcaacaaaggctacaactgatgccaatctatctctggctagggccctaggactgccctccagcctgggttcatatgacttgtttctctggacaggtctgctcatgtctgctctcacrgttttcatcctgattctatactttgtgattgacaactttgtgataaatcgcagaccatggctccctgagtgtactcccatctacatccagtactttgtcaagttcttcatcatcggcatcactgtactggtggtggctgtgccagaggggctgcctctggctgwcaccatctcactggcctactctgtgaaggtgagactagaacaatcctatctcttcctttaggatagagatgggagagaagggtaccatgtaacctttagtgaaaagataagccattctatcatctataaactttggctggtgcctcacaagagcagaagtccctggtattatggaaggaccatctctgtcagatgcatcaatgttgaaatgacccagcagaatcttaagagaatgacaaaaatggtatcttggatttttttttttttttaagacagagtctcattctgtcacccaggctggaatgcaatgatgcaacctccgcctcccgggttcaagtgattctcgtgcctcagcctcccaagtagctgggattacaggtgtgcaccaccatgcccagttactttttgtatcttttacagagacagggtttcaccatgttggccaggctggtcttgaacttctgacctcaggtgatctgcccgtctcagcctcccgaagtactgaaattacaggcatgaatcactgcacccagtcagtatcttggatttttgtgtgggactggaagatgaaatgtggagagatgttggctaggaaatggcctttgacctagatttaggagagtccagttagtccccctctcaagtcttttctcttctcctttgtagaaaatgatgaaagacaataacctagtacggcacttggatgcttgtgagaccatgggcaacgccaccgccatctgctctgataagacaggcacgttgaccatgaaccgcatgactgtggtacaagcttatattgggggcatccattaccgtcaaatcccaagccctgatgtcttcctgcccaaagtcctggacctcattgtcaatggcatttctatcaacagtgcttatacctccaagattctggtaagcatttcctttgcrtagacacttagagtgggtggttggaagggaacatccattttctctgaaatgaacccccttattgtttacactgcctaaattgccatcccacatcccatttctcacgctggagtgaacatgtttgggtgagactacagaaaaatccctgggagtcaatggagggttggaggtaagggcctgtaagaatctatggccaggaaataccctcccaattagcatgtaaaagcaatgtctctaaggagggaaagtagaaagtaacccaaagtagaattgggcttatcagaagtaaattactcactttctagaaacaagcatagtgtattagaataagacccacacaaggcgagacaccagcactaccactagagcaaactacaaaatccctaagccctggatggcacaaggatcacggttaccactgacccctctctgcctacccttgaaaaacaacaggctaggcatrgtggctcacttctgtaatcccagcactttgggaagccaaaatggtaagatcgcttgagsccaggagttcgagaccagcctgagcaatattgtgagacctcatctctacaaaaataaacaaaattagccaggcatggttgcgcacctgtagtcccagctactccagaagctgaggtgggaggatcacttgagcctaagaggtcaagtctgcagtgagctgagatcacaccactgcagtcaagcctgggcaacagagcaaggtgctatgtcaaaaagaaaaagaaaaaagatgccaggtgctgtggctcatgcctgtaatcccaacattttgggaggttgaggtgggcagatcacctgaggtcaggagttcaagaccagcctggccaacatggtgaaacccggtctctactaaaaatacaaaaattagctrggcatggtggcaggtacctgtagtccctgctactcaggaggctgaggcagaagaatcacttgaacctgggaggtggaggttgcagtgagccaaggtcgtgccactgcactccaggctgggcaacagagcgagactccatctccaaaaaagaaaaaaaaaaatgttatttcccctatgagctccaggtatataatgtgaaggctttgtaaatgagttctttctccctaagttctctgccttgtcaaggcatcttactcaatagtgctgtgtatatttcttctcccagcctccagagaaggagggaggcctgcctcggcaggtgggcaacaagaccgagtgtgctctgctaggctttgtcacagatctgaagcaggattatcaggctgtgcgtaatgaagtgcccgaggagaagctctacaaggtgtacacctttaactcagtgcgcaagtcaatgagcaccgtcatcaggaatcccaacggtggcttccgtatgtacagcaagggcgcctctgagatcatcttgcgcaagtgagcacccccgaccactctgcttcccttcaagatcctctcctcaggaaggcatgggtgcacaccccacactgaacccatgtgaatgagggagccctccagccaggtggtgacataataactaatatccaagcgtctactcaggccacgcatgttttttaagtgcttaaggtggcttgttgtatttaatcctcacaactcagtaaggtgggtactatgattatccctgttttacagatgagaaaacagagatataaggaagttaagtatctcactcaaggtgatacagctaatagtggcacagccaggattcagacctggacgatcctaagtttccatttcctaatctgaaaacagagatagccatactcagctcctaaaagtactaccccctcactgtaactaaatgattcaatgtatgtaaaatgccttatacataacaagtactagaaacgtttgttctgtgttctcttttccttctctttccttcccattcccatttctgattacagggaatttacataactttaaaagtgactattcggccaggcgcagtggctcacgcctgtaatcccagcactttgggaggccgaggcaggcagaacacgaggtcaggagttcgaaaccagcccgaccaacatggtgaaaccctgtctctactaaaaaaaaatacaaaaattagccaggcatggtggtgcgtgcctgtaatcccagctactcaggaggctgaggcaggagaatcgcttgaacccagaaggcagaggttgcagtgagcygagrtcgcaccactgcactccagcctgggtgacagagtgagactccattacaaaaaaaaaaaagtgactattaataaattacccatagttcatcaaaagttggcactatacctaagtagggctgaattaaccagtgctccaacatggctttagccaccttcttttaatcagcacattcttgtataggaaacctcccccaaaccaccagcaccacacagtgagcactattctaaatactcggattgaaaaagtctctctgccttcaagaagttcaaaagagcaggtgattcacaaatgacttgcattgcattcacatatgggtaagaacagatgacatgggagaatcccactctctatatatctagaccttaactccatccacagcccacctaccttggaaagagggactcagctgggtgatgaatgaaggaaatgtttggccacacttggagcaatgtctttaggaataatacagagttgccaaaatrcctgtcaatgattgtagaaacgtattgagtgggaagggagacaccgcgttcttactgtgcgcctccccaggtgtaatcgaatcctggaccggaaaggggaagcagtgccwttcaagaataaagacagagatgatatggtacgcactgtcatcgagcccatggcctgtgatggactccggactatctgcatagcttaccgggacttcgatgacacagagccctcttgggacaatgagaatgagatcctcaccgaactgacctgtatcgcggtggtgggcattgaggaccctgtgcgcccagaggtgagagggtgggaagccacccaggagtctcaggaagtggggtactagttccctttctagttgtgaccccaggcaggtaacctaactgcctctcacttagagggatagaagtttctgtgcttcctgcttcacaggactgctgtggagtgccagtatgatcgaatgtggcattcctaggactaaygctgtctgagtgttgagaagcaaagggcttattgggctcattatttggtacttaagtgttgtcaggaggtcratttagccaggacaccaactttgtctttagctccctcctttcaatcaacacattctttttgagtacctgctgtgtgctgataactattctagacactaggggattgaaaagtctctgcttctaagaagtttagacagatggactattaattctcaaggcccagaggcatgagagggtgtcatgcatgtgggaaattacaaagagctgatatggttggaacatgggccaggtgggtggagagtggcaaaagcttctgctagaaaagaaagcactggccaaatcgcaaaatgccattcatgccctgccgagaagtctcaattgtaagtgaaagagcaagtttttacacctcactcccaaagcaaatttccccttcaactcatggtacaatagggcaaattcaaatgtgactgccgtgggtaggacagaagtgaggtggcacccaacagtatcaaaatgaccagacctagcccatgctgcatggcaccacttctagggtgcctttctcctgtctgccacaaagggacagacaaacagggacagcttaccagggtcatcaccctcatctgcgcctttcccctttcttcactctccayaggtgccagatgctattgccaaatgcaaacaagctggcattactgtcagaatggtgacaggtgacaacatcaacacagcccgggccattgccaccaaatgtggcattctgacacctggggatgacttcctgtgcttagaaggcaaagaattcaaccggctcatccgcaaygagaaaggcgaggtgggtcctggctagggggaaccaggacctcacctgacaaggaaaaggcgggttctagcataaggcatctgggtcatgtgcgggaaggtgggtggtttctaaagtgaaagctattcgtagtgaaacatctccttgtaccaaactgctgatatggtaacattgggagttgccggctgggcgcggtagcttactcctgtaattccagcactttgggaggccacggcgggtggatcacaaggtcaagagatagagaccatcctggccaacatggtgaaaccccgtctctaccaaaaatacaaaaattagctgggcatggtggcgtgcacctgtagtcccagctactggggaggctgaggcaggagaatcacttgaacctgggaggcggagggtgcagtgagccaagatcatgccactgcactccagcctgggcaacagagcaagactccgtctcaaaaaagaaaaaaaaaagagggggggagttgcttgtgaatgaagcttgctagcttcattcacaagctatcttttgagacagtgtcactaacttttcttgtctttctgctttttcagttttttatactgacttccccctagcccacccctcctgtgtccctgccctttggctaacagtggctaaaggagaatgtggtctggcggtggcacagatccaagctttcctgagctacatagaaatcaaacctaagacctcagaagcaccactttacccacccgagccaacagccaaccctggcccacctcccattaaaggtctgggaaatgggggattggctgccaggtagggacttgggaggaaaaagaaaaaaagcagggcctgaatggtcatcatccatgaatctacccttggagactggttggctgtttcatctctgcttaatccagaataacactttcatgtgggactgtggtgtacccaatctcccagtgactccaagtgtatggagaagttaagattttcctggatagcttttctgcatttgactgatccaggtgtggtctggtgttggcaggtagagcaagaaaagctggacaagatctggcctaagcttcgggtcctggcgcgatcttctcccactgacaagcacaccctggtgaaaggtgaggttggcttccaaataggtgcctgcaacagctgaaggcaggccagggcgaggacagataagaaccaccagccaaagccactctcctgtccaaatagggaggtcctaggagagctcccaggctagtggggagaacatacagttagcaaacatctgagcccttggtgagtatgacacacaataaagttgttgggtttttattttttttattttttgtttttatttttggagaccgagtcttgctctgtcacccaggcaggagtggagtggtgcaatctcagctcactgcaacctccgcctcgtgagttcaagtgattctcctgcctcagcctcccgagtagctgggactacaggcgcatgccaccatgcctgattaatttttgtattcttagtagagacaaggtttcaccatgttgaccaggctggtctcgaactcctgaccccaggtgatccgcccacctcggcctcccaaagtgttgggattagagccgtgagccaccgcacctggcaattgcatgggttcttaaaaacatgatcatgtcttatttaccaatagtactgtgaactaggcagggcaggtattcccattttacaaatgaggaagtttgaggctgagaagacaagtaacttacccaaattacccagctggtacgtggaaatggtgcagtttgacccctaggtctctgccttgaaatccatcctatgtgttcttcatagctgtcttagggtaccggatgaggacaaacttagttcagtgctactcatgaaacaacttactgcccttaggtggttcctgtagaacttctaggaaagggaaaagggaaggaaagaagaaagtagaaggagtggcgggtggtaggaactgaagggtgggggagaccagaaaagctcactgtggtgtgtctgtttctcccaggcataattgacagcactgttggggaacaccggcaggtcgtggctgtcactggtgatggcacaaatgacgggcctgctctgaagaaagcggatgttggttttgccatggtaagctcagcacagtgtctctctgattgcaagctgccttctccatcaggaagccaggtccggcttctggttgcctgctgcttgctacacctgcatagcccatggggtgcttttttgtccaactccatctctcctatctaccgggccaatcatgatatatgtaactggggacccatcaagtatgaagaatagataagagggagggaagtcatgaagaatcatatgcaggaaagccagaccaacataaacttgcctataaacatgtgaggttgtcaactaggcaaactctagaagatttgtgttccctatggtaggcgctctgtgtggctggcaccattgggtattccgcttttcacttctgaggccaagagcatcagaatcacttggaaagttcatgtgaaatcacatgttccaaggctccacagttagacgtcttaattcagtaggtctgggatgaataccagaatttttttttaacaggcacaccagttaattctgatgttcagaaaggtttagaagccccccagattctatcctcacactcaagtagtttatgattataagcctcccatacagattgaactgttggtgatttttagcagtggaaggacatttaagaagtcatctatctttagagaactcttttttttaagggttttaytctaggaaatttcaagaatatgcaaaaatagggagaattgacaggtacctgtcactcagcttcaactatgatcaacacatggccaatcttgtttcagtgattcccccccatttacatccccagtcttcagctgaattgtttttgaagcaaatgcaaggcatcatgtaatttcatccttaaaaatttcatggccgggtgcagtggctcacacctgtaatcccagctactcgggaggctgaggtaggagaatcacttgaacccgggaggcagaggttgcagcgagccaagatcacgccactgcactccagcctgggtgacaaagctagactctgtctcaaaaaacaaaagagattccccctcattgactatttgattactctgaggcgggcagatcgcctgaggtcaggagttcgagaccagtctagccagcatggtgaaaccccagctctactaaaaatacaaaaattagctgggcatgatggtaggcgcctgtaatcctagctactccggaggctgaggcaggagaatcacttgaacctgggaggcagaggttacgatgagccgagttagcaccactgcaccccagcctgggtgacagagcaagattccgtctcaaaaaaaattttcttttcattatatggggggatggtgtggggcaaaaaaaaaaatttcattatatgcctctaaataataattatatatcaataatctatatatctaaaagaatcttaataccattatctcagaacaaaatcgatgcttccttactatcatgaaatttctagtttgttcacattttcctaactgactcaaatgtttttatagtttatttgcccaaatcaggattcagataagatccataacttgcagttatttgatacatctgttaagtctcttaacctatctcttggagtgcgcctccttccagctgtaccagtagctgtactagctgtatagtaggtttctatacaaacccatagaatgcagattcacccactcaggccccaccccagatttactgaattggaaagccgggaactggggcccagaaatcttaattaattatgttaaatctgttaaatgtgttttgacaggctctctcagtgattctatgtaccctaaactttaagaatcactgatcttataggatctctatgttgggagtccccaaaaacacccctatattcatggggttgctaggaggactcatgggacttggcatatagttgtactcatgactaagattcataacagtgatgtagtaagaatacagttggatcataaaagaaaaagacaatggcagaatctggataaatctatttgcagtctttcttatgctctccctcccatgaggagtcaaacagagtccattctttccccactaatgaaaacacagaaatatatgtgtgatgttctgcctagggaagcccatcatggacttagtacccaaggtttttcttgaggctggtcacataggcaccttctgcctagcacataccaaaattccagactcccaaaaggaaagcaaatgttcaatgtaaaccacattgttcggacacagtctagacacaatgagccacctttatcagttagttgttgagggcaagcattctgagagcccatttcccagaagccagccaagggcccaccctgcaagcattccttcctaaggacagtcgtctcaggcctgctgtgttaactctcttttgcacaatccccctccatcttttttcctagcaacttagttttgaaggaagtgggttgtttgtctgcagagactatccctcagtatagattttgttgattatttcactgtgatttcctttaacgtattattttcttccttatatttcctataagcaagtagttggttctagaagttatcagattctagaccctttctttcattgagggctgcaaaatgacaatattgtaattctttatttattaacttaaatacttacataaaaagagattcccggccgggcgtagtggctcgtgcttgtaatcccagcactttgggaggctgaggcaggcagatcacgaggtcaggagttcaagaccagcctggccaaaacagtgaaacccgtctctactaaaaacacaaaaattagctgggcatgatggcgggcgcctgtaatcccagctacttgggaggctgaggcaggagaatcacttgaacccgggaggcagaggttgcagtgagccaagatcacgcctctgcattccagcctgggtgacaaagctagactccatctcaaaaaacaaaagagattccccctcattgactatttgattactctgaggttccaatcctacctgaaaggtaggtttttggtttgttttttaattactggttttttttaaaatgatgagttgactttttaggaacctccaaaggtgaccaatgagtggatttttttttaagtatcattacgaattcatagatttaagtatatttgatgtgtttcaatccactgctcttagtatggttttgatgctcaaagtgatccaccattaggcagaagaggcctcttcaacattgctgagtcctttagatacaaccccrgttgtttttaatagctttcttggtttattcttggttttttcgttcttttttatcctggataggagatagtccatttctccaaggattcctgcttcattttaatgtgaaatggtatttattttatttatttatttatttatttatttatttatgagacggggccttgctctgtcacccaggctggagtgcagtggggcagtctcggctcactgcaacctccacttcccaggttcaaacaattctcctgcctcagcctcctgagttagctgggattacaggcagctgccaccaagcctggctaattttttgtatttttagtagagatggggtttcaccatgttggccaggctggtctcaaactcctgaccgcaagtgatccacctacctcaacctcccaaagtgctgtgattacaggggtgagccaccgcgcccggcctgaaacggcctcccaacactttgggaggccaagggggaaggagcactagagaacacaattggaactcaaaggtgttccttgctactgagtagatctttgtttctaagccttttcagtggacaaagctaagaagtatgctcttaagtctcacttgcttttgtgtttgttttgtgtttgctcacaaagagaaaatacttcgtgaattcatatttctgtttttcatttacttttagaattacatattttttattccacttttagaagaaataataattttttaaagaattatagatgtctaacttcctgatttataactttctaattttattttattttattttattttattttattttatttagttatttattttgagacacagtctcactctgtcgcccaggctggagtgcagtggcatgatcttggctcactgcaacctctgcctcccaggtacaagcagttctcctgcttcagcgtcctgagtagctgggattacaggcgtgtgccaccacaccctgctaatttttgtattttttagtagagatggagtttcgccattttggccagagtggtctcaaactcctaccctcaagtgatctgcccaccttggcctcccaaaatgctgggattacaggcatgagccaccacacccagcttctaattgtatttaacttccctgattttatgtttgtatcccttaagctgaaaattttgattcctaattgcattaacatgattattttttgttttattctaaaatatttcaagtagttacaaaatatcaataatattaataatacagttactctgccaaaaacaattaaatatttttctcatagttccttttatccataggtatatgctaccaggaatgtgccatcaaattattgtttttaagtcatttgtaacatttgtctgtgtgtgtgcagttgtgctaccaagtggctaccagatcatttatatcatgttactttccgttttggagattgctttttaggccagtgtggtggctcacacccgtaatcaatcgcaacactttgggaggccaagggagaaggagcactagaagccaggatttcgagaccagcctggacaatatagtgagactcccatctctaaaaaaaataaaaaattagccaagtgtgctggcacacacctgtcgtcccagctactcaggaggctgaggtgggaggattgcttgagcccaagaattcaaggctgcagtgagccaagatcacacctctgcactccagcctagatgacagagcaagaccctgtctcgaaaaaaaaaaaaaaaaaaaagcaagagagataaaatacatggttctaaagtcaaatgtacaaaacaaggtatattcatacaaatccggcttccaccctcattgcctttgccttgctgcttccctcttaattcaataggtaatttttttctgtcgtttttggtgtattcttctgtttgctcctttaaagtataatcaaatgcagtctgggcacggtggcacatgactataatcccagcactttgggaggccaaggcaggtggatcacctgaggtcaggagttcaagaccagcctggccaacatgatgaaacccctatctctactaaaaatacaaaattagcccgtcatggtggtgcgtccctgtaatcccagccactcaggaggctgaggcaggagaggagactcgcttgaacccaggagtcagaggtagcartgagctgagatcacaccactgctgtccagcctgggcaacagagggagactctgtctcaaaaactataaataaataaataaataaataaataaataaatgtaatatattcatggcctgcccccttagataagtgataccataccatcractcatttttctacctttctttcttcacttaccaacataacttagagattatttcataatagtaattataaagctgggcgatatagagagacccccatgtctacaaaaaatttaaaaattaaccaagcagggtgagcaaatgcctgtagtcccgttactcaggaggccaaggtgggaggatcaytggagccccagatgtggagcttgcatttagctgagatcctgccactgcactccagcctggacaaagcaagaccttgtctcaaatttttttttaatttaayttaaaaggaaaattttgaacaaagatgaaattttggaactgtgctgccatactactactcctagaacaaatgcagagtttctcaaaggtgtcggaatracatgggcttaagtgagatactggcagtggcaacagaaatgtgagaatttggaggtagaatagacaggatttgctctctaccttttaattagtttccaaggttgagggagtaggaggggagggtgaaagggatatcaaagatgattgtaattcccagtctgagctcaacagtaaggttggtggcatcaggccgcagccctcctttctctagagtgacagtgacacatttgctctttgttttcttttgtgtgactagtgtgccctgtagtatttacactgacttcggaagcttcctggaggtcaggaaatggagcctgggctttatccactccctcactgttttccctcccatcttacctcagggcatcgcaggcacagatgtagcaaaggaggcttcagacatcatcctaacagatgacaacttcaccagcattgtgaaggcagtgatgtggggacgaaatgtctatgacagcatctccaagttcctgcagttccagctcactgtcaatgtggtggccgtgattgtagccttcactggagcctgtatcactcaggtgaagggggtgtgggtgggctgagacgggagggatgagtcaggggctaaggaacatggagtgaagactacggtgtgtttactgaagagtaaagacagcgtttccccatgacattgggacaggagttagctcttctaagtctgctgtcttcatctgcttatgtagatggtaacttacaggccttagcttagcacttatgtgtcagccactgtaataagcatttatatgcactatctgtattcttcaaaaatgaccttgtgaagtaggtattattatccccattttatgggtgaggaacttgaggctcaaggaagttaagtagctttctcacagtcactcagctaggaagtggccagattccaagtctaggtgggtcgtgggagctgggccatcgacagggcaaaggtgggctggtttcagagaaaagctaaaaggactggttcttctccccgccaggattccccattgaaagctgtgcagatgttgtgggttaatctgatcatggacacttttgcttcattggccctggccacagagccccctacggaatctctgttgaagcggcgcccctatggccgaaataagcctctgatctcacgcactatgatgaagaacatcttgggccatgcattctatcagctcattgtcatctttatccttgtctttgcrggtgagccactttgggggtgggtagcagctggggtcctggttggaggtgggggcagagaaagaaggtagyrtgagagcaagtgcacaggtcaggartaagcgcagcttcacctcccagtgcttgctgtgctcccgctacacggtgcattatgctactatatgtactcatacagtactcttgagtacagtgtgtactgtgtgtactcaagaatttcacaagggaggctttattatttctttctttctttttttttttttttttttctttttggagacagagtctcgctctgtcacccaggctggagtgcagtggcgctaactcgggtcactgcaacgtctgcctcccaggttcaagtgattttcctgcgtcagcctcccaaatagctgggattacaggcatgcgccaccacacccggctactttttgtatttttagtagagatggggtttcatcatgttggccaggatgggctcgatctcctgaccttgtgatctgcccacctcagccccccagagtgctgggawtacaggcatgagccaccacgcctggcttatttctttttttacagattcaaaaaattaacctcaggtcccataatgagtacatagttgcagtaaaattcaaacctatgattgcctgactccagcgcacatagtcttactaccatgctgcactacatgagagcaagtatcaatgcagcaaactgagagagaaggtaaaataagtcaagaccagaactaacatttaaaatgtttaataactagtacaacaaaaaattagccaggcatggtggtgcacgcctgtagtcccagctatttgggaggctgagatggaaggatcacttgagcaggaaggtccaggctgcagtgagccatgatcatgccactgcgctccagcctgggtgacagagtgagaccctgtgtcaaaaaaataaataactagtgcagctcagatattgattaattagaatggacaccagccataagcaagcagtatatctgtaccaacacattcttactcttagttcagaccacacttaacctccagtgcttctcctctccccactaggtgagaaattctttgatattgatagtgggaggaaggcacctctacattcaccacccagccagcactataccattgtttttaacaccttcgtgctgatgcagctcttcaatgaaatcaactcccgaaagatccatggagagaagaaygtcttttcaggcatctaccgcaacattatcttctgctctgtagtcttgggcacattcatctgccaggtgasattctatctgcagttggggcaggagatctggaatgataaagggcagaagctgggagccagggttccctacatacctaggaaaaggaatgaaggaattacggggactggagctgtaagttgaacactttgggattcccaatctgctttcttttgcatattgctctagaattggagcccattgtgtcaagagctccagtgcagggcagcatgttgactggaaataaaataatacttctaaaatcctttcatgatctttctaaatacacagaaatttcacagaatgaccaaaagaagtattctcttctagtccctttctatggctcctgtcagcctatatgaaatgtgcatgcacatctagtatagactctccctgtccctgccctttgttctgaagggcttatgataaaaagtgttgtgcaactcaaagaaagagaagtaatgggatttgtacatgtatattacatagtcagcccagcttggactcctccaatatgagactatgagctgatcatgtcccatccctcagcagggcacctccctttatttgtccccatcctcaattcctttttttttttttttttaattttaaaaatacagatggggtctcactctgttgctcaggctggtctcaaactcctggcctcaagcaatcctcccgcctcccaaagtgttattacgcctgccattttttctttttgttttttttttcgtttgagacagatatctctctctctctctctctctctctctctctctctctctctctccctctgcctctctctctctctctcttttcccccctcccccagggggagtgcagcctcagtctcccaggttcaggcaatcctcccacctcatcctcagttcctaactccatcactgtaccttctccttgtcactaactggctttagtcacaagaagccaccagctcccctaactcctccagattgtctgttaatcatagtcacagtaactatgtctgtctccccatcagagtgctcttaaaggctgtttttgtctgtctcccctttgagatttcttcttttcccttcccctgcaagcaaatcgggacttgtacccaaggatcctgaggagtgggatgatgtggctttgggggccttggctggagggccagctgcctgttagtcatttccttgatggtgggctgcccctttctctgttctagattttcatcgtggaatttgggggtaaacccttcagttgtacaagcctcagcctgtctcagtggctgtggtgtctcttcattgggattggagaacttctgtggggccaggtgagtaccggcacaccctcctggtgcattctcacagcctgcagaactcccctcctctacatgagatggaacaagcaacggtggagaccccccagctcctcatcttcatcttctcctcttccctccccacccccactcaagttttcaagttcttgccatctcataggatctcaaggtggaatgatcacttcagaggtttcagaattcttctctaactaagcctggaggtagaaaaatcccttagcttggctgggcgcagtggctcacacctgtaatcccagcactttgggaggccgaggcaggcagatcacgaggtcaggaaatcaagaccgtcctggctaacatggtgaaaccccgtctctactaaaaatacaaaaaattagctgggcatggtggcaggtgcctgtagtcccagctactcgggaggctgaggcaggagaatggcgtgaacctgggaggtggagcttgcagtgagccgagattgcgccactgcactccagcctgggcgacagagcaagactcagtgtcaaaaagaaaaaaaaaagaaaaatcccttagcttctctgagacagaaaccaaacttttcaatggaattttgctacaaaaaaaaaatatataataagggtcttagaagtagaagagtttacaagacacatgtctttattctcatgaggcagcaacctggctatgggctgtcgagctgacataattcagggtttccagcctcttctctttcttgccatggctttatctgggtggaattcttaactcttacctgagataaattcagatttacaagatctctagagtagcagtatggcctgtggttcagagcatggactctgggaatgactgcctgggtttgaatccagctctctgtttttttttttttttttttttttttctgagacagagtcttgctctgtcacccaggctggagtgcagttgtgtgatctcggctcactgcaaactctgcctcctgggttcaagcaatttctcctgcctcagcctcccaagtagctgggattacaggcaaccaccaccgcacctggctaatttttgtatttttactagagacggagtttcaccttgttggctaggctggtctggaactcctgacctcgtgatctgcctgccttggcctcccaaagtgctgggattacaggtgtgagccaccgcacctggcccagctcttgttgcccaggctggagtgcaatggtgcaatcttggctcactgcaacctccaccctccaggttcaagcaattctcctgcctcagcctcccaagtagctgggattacaggcacccaccaccgcgcccagctaattttttgtatttttagtagagacagggtttcaccatgttggctaggctggtctcaaactcctgatctcaggtgatccacccgccatggcctccgaaagtgctaggattacaggcctgagccaccgtgcccagcctcagctctcctttttataagctgaatcatcttgggcaagttacataaccaatctgtgtctcagtgtcttcagcttaggaaaacaaggtcattgttaattagtgaatcagttactatacagtaatgaataatgtcttattccttataaataatcaaattttaaactattacgattataatagtatcattaagtctaatagtttcacttcttccttaataccactttacaaacctccctcatcctcagctctggcctgggctatacctctctttacagaccccaggtctctgcagataatcccttagtgtccagccacccaggtaatggacactttgccctaactggcctcaaagagccatttctggagctgcaggccttctcccctaaacctgctagttatttatttcatacctagatgcctccctgaataatttctttttcttttcttttcttttcttttttttttttttttttttttaagagatgggggtctcaggccaggcgcagtggctcacacctataatcccaacactttgggaggctgagtcgagcagatcacctgaggtcaggagttcgagaccagcctggccaacatggtgaaaccctgtctctactaaaaatacaaaaaaaaaaaaaaaaaattggccgggcatggtgacacatgcctgtaatcccagctacttgggaggctgaagcagaattgcttgaacccgggaggcggagtgcaatgagctgagatcacggcactgcactccagcctggatgacaagagtgagactctatgtcgaaaaacaaaaaataaagagattggggtctcactatgttgccaggctgatctcaaagtcctgggctcaagcaatcctcctgcctcggcctcccgaagtgctgggattacaggcatgaaccgctgcacccagccctccctaattaatgtctgacccaattccctccaccctgttctgtttggtgaagatttctttttttttttttttaccaatgggttcctaaagcagttttatgctttggtaaagcttggttgttaaacctgttgtttgaaactctgttctggctcttgcctcacatgtggccatgtggccttgctgccagacagcagccttccttctgtatcacaacagctttttccacattcagaggcagagctctggcattcttcccatttcaaaacccttgactccatatcagattgcccatacagtccctcttccccacatgagccctggctactccttatcttgtccggaaagaactgactgacaggtgctgagctcaccgggaaatttatttcaaatttcaaaccctatgtactgctccttgtcttctgataatactcatgtgacccctcttctatggactgtcccatccacttcctcacctcaagcccaagaaaacttttggtatcctttcacaagagtttgtaacacagaaactactttgcatgtggcaactaagaaaggggtcattcatttccaatacccttctcaaccccttgcctatacataggcaatatcaccatcttctccccaaactcttttcccccaggtcctggtctctgtttcttcctactgcgtaccatgctgtatagttctgttaaccttaaaagacagattgcaaaatggaacagaagaaatgagacagaaagaggaaaatgaagtatatgaccaggcagatggctggtcaattactagaatagaagctctcttttgtgtgtgtccataaatacagaaaaccttcctaaaagcctgaccgctggtgggcacttggagaatgcttgcctggatggattggtgcttctgcccactgctcttccagtgggaagggtggtagggcaaagagtaacctgcccaagggcctggctcatgtaagttgactgacagctcttctcacgctgattctgaygtcttcctcttcgctgcgcytgttttcagttcatctccgcaatacctacccgatccctgaagttcctgaaggaggctgggcatggcaccaccaaagaggagatcaccaaggatgccgagggactggatgagattgaccatgctgagatggagctgcgccgaggccagatcctctggttccggggcctgaaccgtatccagactcaggtactctgatagtggtctgtccttcccttgggagaagcagcttcccatcttggaaggtgttgggagggtagcagttcttgtcggccagcatctcttcccttccaaaggctcactactgatgggcagccctagatcctcagcttcaggacagacacgcaaaaggatctgtgtggggtcctctgagaggagaggagtcaaatgacctagaccatgggacactattagcatagtcctttagctctgggttgaccctaaagcccagcctgccaccctctatcaaatgggcaagcttcagcataaggtctcttgcaagcactagacctgaccccagggtgggaaatgctcagtttttccctacccttcagaaggaaggagttagacaatatcaatatgccaacatacccagcattcacttaatatagcttcctcacactgccattataggaatagatgctatctggaagggtctttgtaaaagaaactcaccttgttatatctcccccattcaaagtgtaaggccatggtggggaatctgatggtttcatgtgtaaaaatgacaatagtctcttgatgtctgagcatcttttgcaggattcagacttgcttcctgacaaggaggaagcaataatttcttcaagcctcttcccttcttgcaatttctgaaatgggatagaagccacccctgctgctcttatgtcccctgtctatagccccacaataacttttattttttccactttccatgcatcaattgtaactactttctcctgggtgaatgcgctgatctaagcattgataattctgtcttcccctgctctcaccccccatagctttattgttttaatcctgagattttccatttcaaaaacactgtaaattccaagatctcaagggtggtctccagaaaacaggcgtatttctctctgctgattggctagagatcttcaaaataagtttcactgtctaaaactggccttgcaaatgttttagaaagttccccagtcggccaggcatggtggctcacgcctgtaatcccagcactttgggaggccaaggtgggtggatcacctgaggtcgggagttcaagaccagcctgaccaacatggagaaaccgcgtctctactaaaaatccaaaattagccgggcgtagtggcacatgcctgtaatcccmgctactcgggaggctgaggcagaagaattacttgaacccgggaggcagaggttgtagtgagctgagattgcgccattgcactccagcctggccaacgagagctaaactctgtctcacaaaaaaaaaaagactgggcgcggtggttctcacctgtaatccagcactttgggaggccaaggcaggtggatcccctgccttaggtgaaaccccgtctctactaaaaatacaagccaggcatggtggcacatgcctgtagtcccagctacttgggaggctgaggcaggaaaatcgcttgaacccaggaggcggaggttgcagtgagctgagaccacaccattgcactccagcctgggtgacagattgagagttgtctcaaaaaaaaaagagaaagaaargaagttccccagtcaatcccacctcgttagtgtataggagagatagatggagtgaatattctaaactatatacctggtaggaacttatcccctataggcaagacaacaaatagraaagtggaaaagaggccgggtgcggtggctcacgcctgtaatcccagcactttgggaggccgaggctggcagatcataaagtcaggagttcgagaccagcctggccaacatagtgaaaccttggctctgccaaaaatacaaaaattagctggacgtggtggtgggcgcctgtaatcccagctactctggaggctgaggcaggagaatcgcttgaacccggaaggctgaggttgcagtgagctgagatygcrccattacacaccagcctgggcaacaaggcaagactctgtctcaaaaaaaaaaaaaaaaaagaagaagaaaagtggattgcagactcactatgcacctgactgtacttccaggcaggtgctttttctgtctgccagagaaacattccagggtgctgtggctgcctcacctatccagggcgatgcagctccctggggacacaggtgcttcctggggagccctgagcacttctccgtgttgctggcctcacatccaattgggcaggcattggagtccgggcactgcctggagctcaccagaaggtgctttacagtggtccttggtttgtctctcagagggcttggtcccctctgctgtgaggctggactgcagctgtggtggcaagtgaccagatgtcactgagcagcctgaccatggtctaggtggtgcttggatgcatccacttggcttcctttggtcattgagtttcaagaagagaaactccaggagacggcttggccaggatcaggcaaaaacaatcatgccgaaaaagtggcagaaaagcttgaaggtctctcagtgaaggaggagaccaaggaggatgctgaggagaaacaataaatcgtcttattttatttccttttcctctctttcctttcctttttttaaaaaaaaatttaccctgcccctcttttttggtttgtttttattcttttgtttttacaagggatgttatatgaagagctgaattaaaaaaaaaaaaaagaagaaaaagaaaagtggaaaagggctaggtagggaaacgctagggttccttttccctctctcaagttcctcctctcagaaagaaaatttccagcgggacctacacaaagtgcctcgtggcatccaggcatccagaatccccacgctcactccctaccccaccccacactccaggctgctgactccaagtacccatagaacctggcgcctttggctcccatctctaaagcccccagtgctttcctttgggtctgctctttccaaaataacctgtctttgctttgtttttcttcaggatcaaccacttctactatgtgatttcttttctcctagccaagattccytcagtccagtacctccttgctcctttccagtcttctgtcctgggaggctgagatttatgggtcttccttgccctccactaccaatttctatttccttgactatgcccctctctacaaggtctttttggtttcactgcctacatagctttaggtatactacctttccgcattgttggagcatgaggcagttgggccaaaatggcattaaagcctaaagtgaggcatgttcaagatgccacagtgaccaaattcacgccatccaggatgcacctgactctggaagctgatgaggctaatgatgctaaygtgtatcctggatccctgaggtccgctcccaacatcagcccttcagcctcagctgggttctaacaaaaccccctgccacctccacgttgatctttgttgtcattctcatcgcagtgctttggtatgggaggtgttagaaaacttagagactagaattgtggaggttgggaccttgtaactccaataagcactgaagaaggtgtctctacagtcccttcttccatggagctggaacccccgcacccaccccaagtgtaaaccctctcctcctgcaggttcaagctcctcagtcccagggaactaaaactgaataatgtgaggaagcagtgatgtttctgctcaaactgtgatctggatccagaaactagccctaaacagctcatggcttctcaggaagctttataaaaggactgtctcactcacattctgcctactttcccatcttccctcctgggaaaatgaagtccagttaatggaatcagcacctttccttcattcctggtagattaacccttggcattaagcagatagatatttctaagattattctaccagattcatgaaggctaaagggaattccttttgattttgtccttgttacttaggggtcagggataaggatggtagagttgattgaggccctagatcaggaccattgtcagaaaatgaatggcatggccgggcgcggtggctcacaccttaatcccagcactttgggaggctgaggaaggcaaatcacaaggtcaggagttcgagaccagcctggccagcatggtgaaactctgtctctactaaaaataaaaaaattagctgggcatggtggcaggtacgtgtagtccctgctactcaggaggctgaggcaggagaatggcttgaacccagcagatggaggttgcagtgagccaagatcgtgccattgcactccagcctgggtgacagagcgagactctgtctcaaaaaaaaaaaaaaaaaaaaaggaaggagggaggaaggaaggaaggaagctgggcacagtggctcacgcctgtaatcccagcactttgggaggccaagaccggcggatcacgaggtcaggagattgagaccatcctggctaacacagtgaaaccctgtcactacttaaaatataaaaaattagccagcctggtggcgggtgcctgtagtcccagctactcaggaggctgaggcaggagaatggcgtgaacccgggaggcggagcttgcagtgagccgagatcgcaccttgcactccagcctgggtgtcaaaaaaaaaaaaaaaaaaaggaaggaaggaagaaaatgaatggcattaattgcctctgtctctgaggaacagggcactgaaaaccagaggctacttgtgtaagcctcgacctgtagctgtttcaaccaccaccaaccaaaacctcttcctccccctccctcagtctaattgccgagttactgtcagcatttctgccagacatttcagatctctaatgcattaatgcacttagtagcattctcgatagtgggcttggccactgggttcttgagctccattctcagggagcctacctacttcagcccagggaagggatagctcagacaagatacccagaggaggatgagcccagcaactcatggcccaggggtctttccatcatggccatttgtatattggctactaaatggcccctgttttttatttaaacacatgagttattttcctggaaaatccgcaaaaatacgtagtcggtttaattgatttagaggttcctgagccttcaaattcagtaatacataatttgccttcagaatcttcaattgtttgccttatttttaagagtacaggtaaaaaggggcctgtaggtggaggttgcagtgaaccgagagtgtgccactgcactccagcctgggcgacagattgagattccatctcaaaaaaaaaaaaaaagtacaggtaaaaacaacgaacaatcgctgtctagctgttaggagtgatggagtagggaaaagtccctttacattttaaatactcttggccccctctaaacctcaaatgcccactgtggattcaaagggaagaaaaaactagattctggctgggcgttgggactccatggcaaattgttccctaagtgaagtatgatatgcaattaacgtttttctccttctcctcaccattgctttttgtgggagggaagctctctcttgctctctcctgtccccttttcccatctacttccattcctgcttccccaaccttccatgaccctcccttcctctttcttcacctctctcggactgactgtggagcaaagctgtctcactctctgattctttgcagatcgacgtaattaacacattccagacgggagcctcttttaagggagtcctaaggcgacagaacatgggtcaacaccttgatgtaaaacttgttcctagttcatcctatgtagcagttgcaccagtcaaatcttcccccaccacttctgttcctgctgtttcatctcctcctatgggcagtgagtgatagtctattatgatgcatgatttgctaaaatgaccacaagagagcacgtggcatccactttaaccaaccatggttatcttttccttttggtttttccctttgatattttgacttaagggaagaaaaagacaaaaatcctactctaaaaccagactgtgtgcccttgtattttatttttgtaatgtagaaaagctattaaaccttaactgttttaaagacaataattctgttttctgattgttcctctgcattgctcatttcttccttttcttgagttttgttttgttttgctttgccttttttgtttgtctgtttgttgctttgctgggatatgttgttgttcctctcttctcctcctgctcctttgagtctgaactctacctcctaagcttagatgtgaggttaggccagaggaaaacccaagagctttctttacatgggggcaaagtttgggatcttttgaggaaaggtaggaagggagctaatgtgcccatgggtgtgttttgactagtggacctgtcataattgagccagtattaaacttggtcaataataatagtccatttggccaccactgtattgctgactggcaattttagcataaaagttgtagctggctgggcacgayggctcacgcctgtaatcccaacactttgggaggccaaagcagatcacgaggtcaggagatcaagaccatcctggctaacatggtgaaaccccgtctctactaaaaatacaaaaaattagctgggcgtggtggcgggcacctrtagtcctatagctactcgggaggctaagacaggagaatcacttgaactcaggaggcggaggttacagtgagccaagtggagagccactgcactccaccctgggcgatagagcaagactctgtctcaaaaaaaaaaaaaagttgtagctataggtgaagaaaagaaagtagttcagttcaaatgtatatggttgaacatccccgttattttacttttctgggactccggtttaaaaatcagttaatcttggctgggtgctgtggctcacacctgtaatcccaactttaggaggccgaggtgggcggatcacctgaggtcaggagttcaagaccwgcctggccaacatggcgaaaccctgtctctacaaaaatacaaaaattagccgggcaatatggtgygtgcctgtaatcccagctactcgggaggctgaggcgggagaatcacttgaacccgggagtcagaggttgcagtgagccgagatagcaccattgcactccaacctgggckacagagtgagactccrtctcaaaaaaaaaaaaaaaaaggccaggcacagtggttcacgcctataatcccagcactctgggaggccaaggcaggtggatcataaggtcaggagttcaagaccagcctggccaatatggtgaaaccctgtctctactaaaaaatacaaaaattagccaggcatggtggcacgtgcctatagtcccagctactcaggatgctgaggcaggagaatcgctggaacccaggaggcggaggttgcggtgagccaagatgctctactgcactccagcctgggtgacagagacagactccatctcaaaaaaaaaaaaaaaaaaaaaaacgaagaaaaaaaatcaattagttcacatgaaggtacgagaaatatacaaaagagtcaaaataacattttttcttcatttactaaacttttaggagtttctgaagaggagtgccttttattttgcttctccttttctctagtttgattgtttcaccaatagccagcacttattttgcacataaagtttcaggaagccctttctcagccggacttgcaattggagtattatcaactcacaacctaagatctggtgttcccattggtagattcttggattcttgctaatgcttatgtcttcctattcctggtcattttcccttccccaaatgggactcagagaggagagagaaggtagccagctctttgctgataatgtgggaaggagtttatctgtattaaatataatgtgggtttcaaatagctgagtgttcagtctgttccttcctcccccattcccaacctcaccaccccccaccccgacctctgcaaaggggctcaagaaagaacagttgccttgtctgtggttcacatgatcacggactgtgtgggttgaccagacttagatttgttttgtctctttagccaaagtgttctgatgtgaggaatgggggtggaacttgatagagatacatacaatttctttaggtcaaaaaaacaggcaagaaagaactcactaagtcttgccctgcaagtatccaggaacctctcccaccagttctttcatattcctctcttaattccttttttccttctagttctgccatccccttctaactagcttctgttctgttttaatcatccctttctgataggaagggttagtgtcagatatcctgatggtttgatggtggaaggagactaagtagaagactaagcagaagactgggatcttgtagagcagctggtagagggtgtgctccaaatcctcaaagactagatcagaggagagacaggccacacctgctctttctccagctgtgcctttttagttggagctcctagaagttatagccatacattttaaaaccctctttcccattccagatctccaaatgaattcaactgtttgtccaaccttcattagatagatctctaagatttccctgcatagggaggccctaatccttttcttctggtttctgaaaagagcagaaaactgcctggcgcggtggctcacgcctgtaatcccagcactttgggaggccgaggcaggtggattacttgaggtcaggagttcgagaccagcctggccaacatggtgaaacctcatttctactaaaaatacaaaaaaaaatagctgagtgcggtggcgcacgtctgtaatcccagctactctagaggctgaggcaggagaatcgcttgaactcgggaggcggaggttgcagtgagctgagatcacgccattgcactccagcttgggcaacaagagtgaaactccatcccccccmmaaaaaaaaaagcagaaaactacagaatgagaaaatggagtcttcacctgcccactcattgagctgcagagagtagccctcagcactcatacccagtctcctgagtcatgaaaagagttgcccttcaaccagccacttccacctgtaggccagggccccaaaagagacatttccccaaggttttgagaaatgatgaccaggaagggaagggttgactggctgtgtggagagtgctcaaagctttccctgcaccttcttcactagccctgtcttgtccccatacactgctcatgcaccaggcatcatgctccaggaaggggagatgccagccctgggtggattggtggtgatatagtgcatgattgttcatcagcatgtgttctctgaggccagtgctggagttggggcatcctggcacagccccatgccctctcctccctcacccttctctccacccaccaagccagctggtgctccctagctctctgacccctcttcacgtgagcttccttacaggtggctggtttccctttagattccagaagtcctgcagtctagctggatgactgtttcttgctccccaaaagacatttcccatattttttccatctacccatccccaattcacttttatcttcctcattgtttacctgtaacagtattattggtcaccccaacaggtgagaggaaaagccaacaaacagggctccagaccctcactccaaccccagttgttacaaatttattttctatagtggacttcacatgtaattttttccaacaaagtattcaattgaatggaagcaggaaattgaaaatcactgatattgaagatgatgtactggcggataaaggcacctgccctcctgtaatattcagtagaaattttgagatcttgaaaacatatgaaaaatgtgggctatgttatcactcctgacagtgatggctttgatggagtgggatgactttggacccatctcttggccagtgtatctgtgccagggtcaaaggagaaggcactgggtttggactcactcaatccaaattgccttgctctgagattttatgtagatcagtgaaaacttgagacttcctgaagaccagatggagcctccattccatctgatctcacctagatctggagcaaaggcaacatgataggtaaaatttgcacatcagatggtcaaataggaatcagataataaaaatgtggtcctcgctgtctgttcagcatggtgagtgtgtgcctgtgctccctgattcttcttggctgaggtgttgagctgatactgttgagtggcaaggagtcctttgccttctgagctttgagmaccctcagtcttgggtgggtctgcaggctgtagtagagtgggacgagataaagaaagccttagccagcagagacacattctcctccagagaaaacggaccaacagtattgatagtgagccttctttgagtggtatttatgaaggttctgtatggtggtaggaagcactggaacaggtgatccaaccagtttatttggctgactctctgtatcctctgctgtctccaaattcttgtgtcttctcctggaatatatttttggttaaacagcagaggaatgaaagaggtaccctacccccaccttcatcactcctacccctccaacctcaacagtttcccccacattactcccatttcttttctgagtgaagattttttggacaagactaggatcagccaccttccaacaactagaaccgtcctacaaccatttacctttcccctggcccctctctccaacttctcggagctccaaccctctccccctaccccaattctaccatccctgattctaagccacgcctcagagagacctgcagttcagaaaagcagagctgccaaaattgctggtgcctgtggacaagcaaaagctgttcacaggcatcaattattgtcagttttttcttgatgactctgaactgaccgaatcccttcctttttgcgcagtaagacagagactatgacactgggcaatgcatctccttttgcccagtaaaaccgcacgtggtttcctttccttcatcctcttcatccaccccatcagaaaggccacttgtttgtagcactgcctcctggattaggtttctctccctggtccctttcattcccttctccacataagactatgctcctcttcacaatttggaaacagctrgagaaagcagcatgattgggcacagttgctgtgtatcagagacatgaacgtgcatttgaattatgagagccaggtcttttctcaataggcaggaggaaggcatcttttgacacctgtattttatctgctgcttctagggaaggggctgaaggagtgaagttctgtgttatttgcggggaggggacacagtggtggttgtgggatataaaaatatgcatgtttcctggctgaaagggcaaattattattagagagttttaagttcctgcatgctgctgacacaaatgaagattggtttgtctgcctggctgcacagttttcatggtcactcgtcacccaacctgtattatgtgcagattggtgtatgctggctctttgaggtctttaaacagataactaaacctcaatgcataatttttccattccacattcacaaaatgtttggcctcagcacagaaatccacatatctcaatcatctttttaagtttggctatgaatttgcatctagttcccatgtccttgccctccatctaaaagaactaatgaaacttcttgttttctgtttcattttaaaagtagattgtttgggaatgctaacgttgctttgggttttctactttttttaatgcagctttcaaaacgtcctagttgccgtcactcaccccagcccaccccactgcttgaaagttgagccatgtgatgtttctagtgccccatgatctcttctgatgtgtgtttggttttgatgctgagcagtcatgttttatagtctgggttttgtttctctcctaaatccaccatctccttgttctgccggccaattctcacctctctattttctcatcctccttttccttcccctggtatagatcaaagtggtcaaagcgttccatagttccctccacgaaagcattcagaaaccctacaaccaaaagtccatccacagcttcatgacccaccctgaattygccatagaggaggagttgccacgaacaccactcctggatgaggaagaggaggaaaatcctgacaaggcttctaagtttgggactagggtgctcctgttggatggtgaggtcactccatatgccaatacaaacaacaatgcggtggattgcaaccaagtgcagctcccccagtcggacagctctctacagagcctagagacatcagtttgaattttctttctctgactctcatccctattttacctatttccattttcgtctrtcccatctatgaggtgatgatgggacttttcatygtcacgtcagctgctgtgttaacagcagtgtgtgtgaagtgaacctctacctgaccatgaagaggcaagagcacagacttacaaggatttcaacttaagcttgacttggggtttgtagcgggacccagtcaaaccccattcaggtcatggtagaatctactccttggtagtcacttgtcatttttaaagaaatgatgacaatcctcttggcatcaccccaccccacattctccccgatgttcctctcctgaattctggattttgtcctacaagtctgtgccatttataagctaagttgagggttcagagggagacaaatatccccaagtgaaatatgttgcggtagagatggaatgtataaaatccgccagtagtgtgattgtttttcaatttttcccactttgaaaacttacacctaaaggcctgtaggcctctaactctttctgccctttcattcaaacctctccaaagttctttgtcttttgtcttcccttcctttccttttttttttttttttttatgatgattaagaaaatggaaaggatatggatgaattgtgtaaacttagatccttctcccttttggcccaaaagaacccttgatttagttccagaatccaaccagtttctttgttaaaagggtccttttgaagcaattaagtgctggtaagaatatttctctgttgttgccaggttaccttctgcttttaaattgccatcttgtaaagtgtatgtggttcttaagtgccagggagatcagccttgcccatgaaggttgcatatgtgtggtatacagtttttacctgaaagcctgagctttctcttattcctaaagtggtggcaaaagaatgaactgggtatgaccctgcccccttactgggcttggatattgaggaccagacgctgccaaatctaggacaagacagaccatcaaagcagacttttgtgggctcctctttggggtgaccactgctttcaaagccatctgccaaggctctccagggcaggacctgactggtggggaatgagtgttcagaagccttgggagaggccaaagagccattctagcatgatctgagaaaaccttcctgcagaggccagaaaccttgagcttaggtgcctggggaccagcttcgacattctctccagtttctgattctaatttttgccacgtgtcacaacttttccagtctctgagaaggtcccagcctttctcaaatattctgattttgaaaatatgtatccaaagtgggaggcccctgtgacattttgccaacttaaacgagaaaaagaccccccgcacccggcacactcccccttcctccagccccgcttcagccacatgctccagctgctgcccagtaaagccctgtgcctttttttcccctgaatactgcccaaagcatccccttcccatctgcctctcaggagttggggactttgctaggagattttttaagtgttccttactgggacaacgtggagccacgtttgcaggagctccatttgtatccctgctggtgttgacttctgtgtaggggccagttcatgtccctgactctcacctcccattagataaatgaagcccacccccctttctagagtgatgagagtcaagaagaggggatgtatgaacggccaaattcccatgtgagaggaagatgacctgatccacctagccttttcttctggatctgtcctccctcacccctttcacctgagctgtccacagtaggaaacataaagaaacaatgtcccctacatatccccatgactacataatccatcatcgtaggaaataggaaagcaaatttgattttggttttgtaaaacgtacatgcttcaataattcttttttgtgtcttaaatactcataggggaaaaaaacagctcacccaaggtgttaggtttcacatatatattcatcaactattttagaagatttaattctatcaaatcttgtattacctcagatcattttaaatagcaagccaataacgagctttgaaggctattttaccattcctgttcacaaaaggttctcatggtgcctgacaggttacccttgagggcttgtgtctactttttaaaagtcaatggttttttttcttgtgttctagtttccataataggagagaaaatatagaaatatatgcaaaaattatagttttctttagatcagaaactgatatttttgggtcagccatatgtattttgtttaaaggatttaaaataaagtgccgtcatgtagccctgtggaagggagcacataaccagctgtttggcatgacaggtgacttagtatatttgtaattggttttaaaaccaatacaccatactttctttctgcaaacagccatctttatacttagggaagaaaaattgttgggttctagacttttttaatataaattttgttgatatggaattaggtaagtttaagtgtctatgtgcatatgttttttatataagttttttctattcagtttcactgatccaactggcagtgggtaaatatggcataagttaataacacttttccccaaaatggtgctttggatttgaaaagggtctgatggggagaaggagaacgtatcatcctagcttcctctcttaataaacctagaaaaacgggtagtaaactgtggatagtcaggaaaacacccagcaagggacacagctgtcaggaaatgaatcttccccccaacccccaccatgcagatggatagacagaatctttcctgactagtcattaggatcaggggcctctgttggatttgtgtttcttgaagaatagctggcagagtggtataaaagacacgaatatctcctggtctataaggatactctgatttggggtttgcatttttcatggtttttatttcctgttccccctggagttttccattagtgagtttttgtgcaaggatcttatttgtgatgccttccctcccctagaaagattttgtgcaatatattaaatggggacagaattctaaatggataaaacaatggctggttctagccctgagtgacagtcttaaggctagatccttcccatagtatcatctgtcctctggaatgactctcctgtccctaaaggggttaagagagagatcacctagaaatccctctggacacttgtgggttctttagggtttgagtttcttcttccccttgagcttcagagaggagagttggcatggttaaatctgaatggttacctcactgctgaaaacccagaggggcgtggcacactcgcttgtgtggaaaagcctctaaatgcatcccttcctttctttcctgcttcctttgccttacaattgaagcagcccgtggtaccatcacagtatgcagagacttcctcacctttcatatctagggaccacccccgatgcattggtgagggtgggcacttataaatgcctgctattgttaagccattccagcctcttcctctgaatagaccagacgccctttcacttagttcagtgccagtccttttgccttcccaaccctgctgttaggcctgctgttccctttgctcttgattaggagagatggaaggagatgagctcccataactgaattggcctttggttcatgttttctccccatatgtatatatgccatatgtgaatatgccatatatatgtgccaacaaatctatctacgttgttcttttcaaattagcacgcagataggaattttgagtttcttcttcttttagtaactagtataacaagcactggtatttttgtacaaaaaagaaaaacaaaagattgactattgtggtctgcatgacataaacaaacaaatggtgatatcaaagcaacgtataccccagtccagtgtgtgttgccataatttgcaattcagcttaacagtgcacccaatctatatttgcattttgatattatttaagctcyatgtacaaggttttgcatgtatttatatggttcttagggaaaaaaaatgctataaactgcaaatctgaaattcaaatgtgttgttccactgagaccagaagaagaagaggagttttaaaagggataatttgttggarccaataaagctttttgctgatgaacagaaaccaatactgctgtgcactgagaataaaaactcatgcccacttgtaactgtgctgtcctcaatgcgtctccacttttgggtaatgccactgattgtctgttgaagttgagaagggaaatgccgcaaccacaaggacaaccccatttaaacaggcacagaattcagcttaccaccagactctgacaacgcttcccttccctctgggccttcgcattggcttcattcccttgcagtgcaagctgtgctccacccaccttggttagaatccacagttcaggagctggagcttttggaagaataagaaagaggcagtcttggcagtccttgctttttttctttcctttttttgttttttgttttttttggttttggttttggtttgttttatatgaaatgtcttttaggagaagtagtttcccttacattagccgcctttcccttgggttctccaccctccccctcacttccctatggtttaaaaaatgtctttcattaattgagtcttgctagagactcatattaggccccagtttcaggtcaaaacagcttcctggcaggtcatttacattctgagctttcatatctgagacaactccttcctgcagctctcatccaggtgcacgacgaagttccccaaccctcttttaaaatatcacagggaggagccaggcacagtggttcacacctgttgtcccagctactggggaggggaaggggctgaggcgggaggatcgcttgagcccaggagttcaagtccagcctgggcaacatggcaagaccccatctctaaaatacacacacacacacacacacatcataaggaggaaaggaccttgtccactccccaaattcctttaggaaaagcatgacattgaagaacgccccaaactctcctggctattttaatagtctggctctgaaagaggatctagccctggttgaaaaagacttatggccgggtgcagtggctcacgcctgtaatcccaacagtttgggaggccaagatgggtggatcacctggggtcgggaattcgagaccagcctgaccaacatggagaaaccccatctcttctaaaaatacaaaaattagccaggcatggtggtacatgcctgtaatcccagctactcggaggctgaggcaggagaatcacttgaacctgggaggcagaggttgcggtgagccaagatcacgccattgcacttcagcctgggcaacaagagtgaaactccatttcaaaaaaaaaaaaaaaaaagaaggtccgagcgcagtggctcatacctataatcccagcacttcgggaggccaaggcaggcggatcacctgaggtcaggggttcgagacgagcctgaccaacatggagaaaccctgtctctacaaaaaataaatacagccaagcgcagtggctcacgcctgtaaccccagcactttggggggccaaggtgggcggatcatgaggtcaggaaattgagaccatcctgactaacacagtgaaaccccatctctactaaaaaatacaaaaaactagccgggcgtggtggcaggtgcctgtagtcccagctactcgggaggctgaggcaagagaatggcgtgaacctgggaggcggagcttgctgtgagccgagatcatgccactgcactccagcctggacaacagagcaagactccgtctcaaaaaaaacaaaacaaacaaacaaaaatacaaaaatcagccgggcgtggtggtgcatgcctgttatcccaactattcaggaggctgaggcaggagaatcacttgaacctgggaggtagaggttgtggtgaaccgaagtcacaccattgcactccagcctaggcaacaagagtgaaactccatctcagaaaagaaaagaaaaagacttaaatgatctgagatcttatccccacttttcttttctgtcctaggttgctctccacaggcattgaacacattgcccacttagtttctttaaaataggggatggagaataaataatgaacttaacaaacaaaaatgaaaataggctgggcacagtggctcacgcctgtaatctcagcactttgggaggccgaggtgggtggatcacaaactcaagagatcgagaccatcctggccaacatggtgaaaccccatctctactaaaaatacaaaaattatctgggcatggtgccatgcgcctgtagtcccagctactcgggaggctgaggaaggagaattgcttgaacccaggaggcagagattacagtgagccgagatcgcgccattgcactccagccttgcaacagagcaagactccgtctcaaaaaaaaaagaaagaaaagaaagtctgctttttccattgtagtttccctcctaaatactcttgctgaaaag

SEQ ID NO: 94220 - DNA, 35831 bp, Homo sapiens
  misc_feature (1)...(35831): n = A,T,C or G
gaaaaaaaaaatgggagataggtttgcatgacccagttcccagcttgacttttccctgtagaatagtgagtctgaggtcccgagattttattttccttttataatataaacatgaaataataatatatatttgtaagatctgaaaactacagtgtaaaagaaggaagaacacacaaaaagaatacacacacacaaacatatatacatatatgcacaaacacacatatatggtctctgtccctgtttcctgggtgcacagctcctgaaacccttgaaatctgcaaagtggtaagtgtctttgtggatgctaatgagacgactgatctctggggcctcgtgaatagcctcaaaatgaggcctggttgccaggggaaccaacctcatgattaggggattggaactttcagccccctgcccccatatttccagagatagggaggagctgaaggttgagttgatcaccagtgaccaatgatttaatgaatcttgcctatgtggccatcgtggtggctcctgtctgaaatcccagcactgtgggaggccaaggcaggaagattgcttgaggccaggagtttgagaccagcctgggcaacatagtgagaattcatctctacaaataaaaaaattagccaggcatggtaatgcatgcctatggtccagctactcaggaggtggagatgagaggatcacttgagtccaggagatcaaggctgcagcaaactacgattgcaccactgcatgccagccttggtgacagagctagaccctgtctctattttttttttgagacagaatcccgttctgtcacccaggctggagtgcagtggtacgatctcagctcactgcaacctctgcctcccaggttcaagcaattctcctgcctcagcctcccaagtagctgggattacaggcgtgtgccaccatgcctggctaactttttaaatttttagtagagatggggtttcaccgtgttagccaggatggtcttgatctcctgacctcatgatccgcctgccttggcctcccaaagtatgaacccaggaggcggagcttgcagtgagcagagattgcgccactgcactctaacctgagtgacagagtgagactccatctcaaaaaaaaaaaaatctttgtagctatctatttaggaataaaatgggagaggcaggtttgcatgatccagtttccagcttgacttttgcttttggcttagtgagttggtggtcctgagatttattttcctttcacagtcattattcagggaagagggtagggtcttgatattcaaaatttcttgggtgataaatctaccagggtttggatgaggccagacattgctctttcagtatctcaaacccagaaagatgagttactgacattgaatatgtgaaaggaaaacagttctgtttaatttcttgaatttcatctaaaacagttctggttttgttttgttttgttttgttttgttttgttttgagacagagtcttgctctgttgcccaggctggagtgcaatggcgccatctcagttcattgcaacctctacctcctggttcaagtgattctcctgcctcagccttctgagtagctaggattacaggcatgcaccaccacacctggctaatttttttatttgtagtagagatggggtttcaccatgttggccaggctggtctccaactcctggcctcatgcaatccacctaccttggcctcctaaagtgctggtattataggcacgagccaccatgcctgggcaaaacagtgctgttgaatttcaccctgacagcataaatgaaaaacttgtcttcacaggtaaaggacaaaggacagaactaaaagtcatccctctgtgcactggagacaaaagcatatctgactgcttcctgtactctatgtttatttatctcatgaaaaaaatgcakattcactgagctcaagataaatgcataattgactatttctccacccttttctttccacatgtaaaatgtagattctgtaaacgctgatcaaagactcaaaggaacacgatcacttggcgcttcaatttgttctccctccccacttgtttttttattttgccttcccctactactcactttctttccctttatttatttatttatttaagaccgagtcttgctctgttgcccaagctgcagtgcagtggtgtgatctcggctcactgcaacctctgcctcctgggttaaagcaattctcctgcctcagcctcccgagtagctgggattacaggcatgtgccaccacacccagctaatttttgtatttttggtagagacggggtttcaccatgttggcaaggctgatatcaaactcctgacctcaggtgatccgcctgcctaggcctcccaaagtgctggaattacaggcatgagccacccagcccggcctctttttccctttaaatattgaagtccccagaccgtctttggaaaaaaaaagcatgcatcacaaatatttcctgtggtttttatttcttttttcctcccactgcatcctcaactttcacaaaatgacctctaaaaatgactgagacacgcttcagtaattttctttgatttacaaatgcttaccaaattcagatgctttaattcagcaaaacacaacagctaaaacaaagatatcagaaaaatgttgaatggctggccaggtatggcagctcatgcctgtaacctcagcactttgggaggccaaggctggaggatcacctgaggtcaggagtttgagaccagcctggccaacatggtgaaaccccgtctctactgaaaatacaaaaattatccagttgtggtggtgagcacctgtaatcccagcttcttattaggctgcggcaggagaattgcttgaacctgggaggtggaggttgcagtgagctgagattgtaccactgcactccagcctgggcaacagcgtgagactctgtctcaaaaaaaaaaaaaaaaaaagaaagaaagaaagaaagaaaaaagaaaaatgttggatagtatctgtgtctctgaaaaagaaacagatcaggccaggcatggtggctcactcctgtaatnnnnnnnnnnnnnnnnnnnncagaaatctgagggtcctccttgactcctccttcacccactgcacatattcagtcaccaagtatcaatgattacacttctttcaggacatctaggctaggcgtggtgactcatgcctgtaatcccagcactttgggaggcagaggcaggcggatcatttgaggtcaggaatttgagaccagcctggccaacatggtgaaaccctgtctccactaaaaatataaaaattagccgggcatagtggtgggcgcctgtagtcctagctactcggaaggctaaagcaagagaatcttttgaacgcgggaagaggagattgcagcgagcgagatcgcgccactgcactccagcttgggcaacagagcaagactccaactcaaaaaaaaaaaaaaaaaatgctgggcttggtggctcacgcctgtaatcccagcactttgggaggccaaggcgggcggatcatgaggtcaggagatcgacattatcctgggtaacatgcctgtaatctcaacactttgggagcctgagctgggaggattgcttgaggccagcagttcaaggccagcctaggcaacatagtgaaaccctgaatacaaactttttttttttttgagacagactttcattcttgttgcccaggctggagtgcaatggtgagatcttggctcactccaacttccgcctccttggttcaagtggttctccggcctcagcctcccgagtagctgggtttacaggcatgcaccaccatgtctggctaattttgcattttcagtagaaatgagggtttctccatgttggtcaggctggtctcaaactcccaacctcaggtgatccacctgcctcagcctcccaaaatgctgggattacaggcatgagccaccatgcccagactaaaaaatgttttgttttttttttgagatggagtcttgctcccttctcgcaggccggagtgcagtgctgtgatctcagctcactgcaacctccagctcccaggttcaagcaattctccttcctcagcctccccattagctgggattacaggtgtgcaccaccacactcggctaatttttgtatttttagtggagatgggcttttgccatgttggccaggctggtcttaaactcctgacctcaggtgatctgcctgcctcagcctccgaaagtgctgagattataggcatcagccaccgtgtccagctgtaatatgcagaatattctatgtaggtattttctatatataagaccccctctaagaagggtttctatgtaagaatagtacaaatgatctggaaaggttaataggcttgacaaatctatgtttcttaaaactgtaaaaatagtctggttgtcctatggtctatgtatagaacatataccatannnnnnnnnnnnnnnnnnnnnnntttaaaaattagctgggtgtgatggcatgtgtctgtagtcccagctacttgggaggctaaggcaggaggatcacctgagcccaggtggtcgaggctacagtaaactgtgatgcagcctgggtgcaagacactttctcaagaaaaaaaagcctttgccaggtggtatggcagagtgattcagagtgacagcataaacacttggaaacagattgattaggtcagattcccagttctgcatcttactagctctgtggtgttagaaaagttactgaaccttcatgtgtctcagtttccacatttgagaaatggtagtaataatagtacctatcctgtggtttggttatggtttgtttggccccaccaagtgttgtgttgaaatttgattccccactgggcccagtggctcacgcctgtaatcccagcactttgggaggccaaggcaggcgaatcacctgaggtcaggagtttgagaccagcctcaacatgaacaaaccccatttctactaaaaatacaaaattagccgggcatgcatgcctgtaatcccagctactcgggaggctgaggcaggagaattgcttgaaactgggacgcgaaggttgtgatgagccaagatggcaccattgcactccagttggggcaacaagagcgaaactctgtctcaaaaaaaaaaaagaaaaagaaaaagaaaaagaaatttgattctcaatgttggaagtggggccttgtgggaggtgtttaggtcataggggcaggtccctcatgaatggcatggtgccattctcgtggcaattagtgattctcactcttttttcttttcttttctttttttaattttttgagacagagtcttgctctgttcccccaggctggagtgcagtggtgtgatcttggctcactgtgacctccacctcccgggttcaagtgattctcctgcttcaacttctctagtagctgggattacaggcacctgccaccatgcctggctaaattttgtatttttagtagagatggtgttttaccttgttggccagactggtcttgaactcctgacctcaggtgatctgcccgcctcagcctcccaaagtgctgggattataggcgtgagccactgcccctggcctgaattactgatttttacatactgtataaacgtctgcatcctactttttcttacttttgttaaatttggcctaaagctgcctcataaacagtgaactgtattctaatttaagcatgtcaagatttcactaatgaaatataaaagtaaaatttaaaaaaagaaaatatgaaaataaaaaaacaatgtaaacatttgggagagagcctttaggccttgtcagttcccagaatgtacttattttcactatgctggggactccatttccagtattgaggtccattttcagaaggtggatttggtgagcatgaaaaaagggggtgggggagtaatcatacaaacaattgtgtccaggccagcttcctaggacatgagggctccctctgtatggcagaggcacctgacatccgtaactgttgtgcaccctgcgaatgactttatggtctaagaatgtatgttcagagccccagctaaggaatcaggagtggcaagatcctggaaggatgccaatctatgaaaccctgagtcaagaggtcaagctgggcacttgttttcctttttctttttttttgtaggagtttcactcttgttgcccaggctggagtacaatggcgtgatctcggctcactgcaatctctggttcaggcgattctctcacctcagccttcccgagtagctgggattacagacatgtgccaccatgcccagctaaatatggagatgcggtttctccatattggtcaggctggtctcgaactcccaacctcaggtgatctgcctgcttcagcctcccaaagtgctgggatgacaggcgtgagccaccgcacctggccaaggcacttggtttcttagatcacccacttggccctcttccaagttgtactttccttctttccttcctgttctaaagttttttaatatttttttttttcctgaaatggcatctcactctgtagcccaggctggagtgcggtggcgtgatctcagctcactgcaacctctgcctcctgggttaaagcatttctcctgcctcagcctcccaaatagtagggattacaggtgcctgccaccacgcctggctaatttttgtatttttagtagagatggggtttctccacgttggccaggttggtctcaaactcctgatatcaagtgatcctcccgccttggcctcccaaagtgctggagtttggagttacaggcctgaacctctgtgcctggcctgcttttttttttagactgagtcttgctctctcgccaggctgtagtgctgtggtgcgatctcggctgactgcaacctctgcctcccgcgttcaatcgattctcctgcctcagcctcccgagtagctgggactacgggcgcatgccaccatgcccagctaattttttagtagagatggggtttcatcatattggccaggctggtctcaaacccctgacctcgtgatccccccacctccgcctcccaaagtgctgggattacaggtgtgagccactacgctcagcactggcctgctttttaacaagcttttactactgctctgcagcttacctccctctggctttctgccttatgcccctcagtgcaattctttcttctgaggaggcaagaattgaggttgttgctgatgtgtagggattcaccacccggaactccaccagtaacaggtcgaggatgctagttgaaaatgttatgtaagctgcatgctttttacaaatggtagtggttctcatgtccagcaatggccactgcaccgtccctgtatgaaagtcccctccataaatctatgtctcctttgctgtctccagatctcctcctctacctctcccacacggtgccttccctactggagtaaactggggtcccgcagggcaccctttccctgcaattttttttttttttttgagacagagtctcgctctgttgcccaggctggagtgcagtggtgcgatctcggcttactgcagcctttgcctcccgggttcaagcgattctcctacctcagcttcctgagtagctgggattacaggcacgcaccatcacgccccgctaattcttttttttttttttttgtatgtttacaaaatagggacggggtttcactatcgttggccaggctggtctcgaactcctggcctcaagtgatctgcccccctcgggttcccaaagtgcacctggcctctctccctgcatctttatgtgcctgcaacaccaagagggagctcttggcccctgggttaaggtcagggctccagaagcccagggtcaaggctatggccgcatcccaaggacgtgcatccctgcaagaggctgcatcagacaggcatggaagaggcgccgctggggcctccttgaattcctgctgggaaaagcaagtggaggtgctccttgaagaaacagggggatcccaccgatctcaggggttctgttctggcctgcggccctggatcgtccagcctgggtcggggtggggagcagacctcgcccttatcggctggggctgagggtgagggtcccgtttccccaaaggcctagcctggggttccagccacaagccctaccgggcagcgcccggccccgcccctccaggcctggcactcgtcctcaaccaagatggcgcggatggcttcaggcgcatcacgacaccggcgcgtcacgckacccgccctacgggcacctcccgcgcttttcttagcgccgcagacggtggccgagcgggrgwccgggaagcatggcccgggggtcggcggttgcctgggcggcgctcgggccgttgttgtggggctgcgcgctggggctgcagggcgggatgctgtacccccaggagagcccgtcgcgggagkgcaaggagctggacggcctctggagcttccgcgccgacttctytgacaaccgacgccggggcttcgaggagcagtggtaccggcggccgctgtgggaggtgcgatctcggggcagggccgggaggcgcccgaaagcccggcggtgggagtaggggagcccgggccccccgcagacttcttcccctgggcgtctccgagctggggcccgcaggaggttaaaggtcaacgggcttgggggcgccggcttgggggacgggggaacaggagcaccctggagggccggggcggattaggcaggaggagaaaaggctcttgccgagccctttcccgaggtaaaggctgagtctgtgcagtatccttcctttcaatatttatttttaatttttaaaaatttttttgagactgggtttgcacctgtttcccaggctggggcggagtggcgccagcctaacttctgagctcaagcgattctcccgccccagccttgcaatttagggggtgccaacacgcctggctaattgaaaaaaaaaaaattatctgggctcggtggctcacacctgtaatcccagcactttgggaggtggaggcsggcgaatcgcctgaggccaggagtttgagaccaggctggccaacataacagggtgaaacctcatctctactaaaaatataaaaattagccaagtgtggtggttcatgcctgtaatcccagctacttgggaggctgagtcaggagaattgcttgaacccgggagtagaggttgcagtgagctgagatcaggatgccactgcactccaacttgggcgacatagtgagactacgtctccaaaaaaaaaaaaaggcaaaaaaacttaaaaaaaaaaaaaagatacagggtgtcactatttacccagggtggtctcgaactcctggcctcaagccatcctcccacgttgacctcccaaagcgctgattactggcatgagccacccacacactctggccacagcggcatgcactgcacagagctgggcccggggatcgggagaaggtgacagtttagatgtcctgaggtcagctctgccgaggcaggaagtcccttggttttcaaggttcacatagaggacaggacatgacatcaggcccaggacgccacccctgttcccctcctgacttggatgtgatctgcagagaagtggaactgggtgaggtctgggcggcttttgcctggtctacatcctcttattctgactttgcagcattcagtacaggagggaaagaggagggggctgggtgccagtgtgcaccccactcacagtgtcctaagcaaagctccccccattcctccaaccagccttcctccctgtgacaggcagtggccatctgcctcttagtcacaggtctgaaccttcttgcctctggctgggatgtggccctgggcttgctcctgtctcaggagatattgtgccccatccactctgaggaggaactcctggccccactggcccaggtgcacagatcgccctggcagttgacctgtcatcagcaagttatctgtcctttctgccaagaatccccgctatgtgtcagggcttgtgctaggcctgggggcacagccgtgcagcacactggtcctggacccttttgggggcctaggagctgagcccggctcttctstccacagtcaggccccaccgtggacatgccagttccctccagcttcaatgacatcagccaggactggcgtctgcggcattttgtcggctgggtgtggtacgaacgggaggtgatcctgccggagygatggacccaggacctgcgcacaagagtggtgctgaggattggcagtgcccattcctatgccatcgtggtcagtgcggccaggagcaggcagggcgggtgggggggcacggctgctgaacagcatgggacctccagctgccwcccacggcatgtatgctggggtgggatggtggggggtcctgccctgccctgccctgggggctgtgccctgtatagggggataggtagcctgatctaccccattgggatgtcattcttcccgtctggctggaaggccccggagccccatgctgcaggttatgtgagggagtgcccgatagtagggcgcctcctcatgccctgacctgcagccccctccccgtatctcctgtgtctgcagtgggtgaatrgggtcgacacgctagagcatgaggggggctacctcyccttcraggccracatcagcaacctggtccaggtggggcccctgccctcccggctccgaatcactatcgccatcaacaacacaytcacccccaccaccctgccaccagggaccatccaatacctgactgacacctccaagtgggtaccatcctgcctccattgcacacacccaccttcccgccccaccctgtggtcttcctggtagggactgggtggccttcacagagtggaggccttggatctggggaggccagggaggcctgtgagctgaggtcaggggacccagagcaagggcccagcaaaccacagtcctcccatcctaggtatcccaagggttactttgtccagaacacatattttgactttttcaactacgctggactgcagyggtctgtacttctgtacacgacacccaccacctacatcgatgacatcaccgtcaccaccagcgtggagcaagacagtggtgagggcttctggtaggatccyctcagcggggcccagggtggctctgtttgttccctgtttggaaagctctcccaggaaaaaggtgctcccagcatstctacaccctcacagattcccttccacctatgaagctaaaattcagcctgtgtgagcggatacgggctcccaaaatcacccgtgtggttgacctcgctaggagaagaggggtctggcctaacgtcacacagctcggggtggcaatcctgtcccttctctatggtgctactctcactccatctccccttgctacacatcgtgctcaaggaacaggcagcttcggtggggggggcgccgggcatggtggcttatgcctgtcatccagcactttgcaaggaggccctggtataaggatcacttgaggccagtagttcaagagcagcctgggcaacatagygaggccatcaccacaaaaaattaaaaaattagccagggatggtgatgtgtgccggtagtcccagctgctgaggcaggagaatcacttgagcctgggatgtcaagggtgcagtgagctatgaccacaccactgcactctggtctgggcaacagacgcagaccctgtctttctttttttcttcttttttttttttgagctggagtctcgctctgtcgccaggctggagtgcgatggcgtgatcttggctcactgcaccttctgctcccgggttcaagcgattctcctgcctcagcctcccgagtaactgggattataggcacccgccaccacgcccggctaatttttctatttttttttagtagagacagggtttcactctattggcctgactggtcttgaactcctaacctcaggtgatccaccctcctcggcctgccaaaatgcaagggttacaggcgtgagccactgtgcccagctgggataccctgttttttttgtttttgttttttgtttttgagatggagtcttgctctgttgtccaggctggagtgctgtggcgtgttcttggctcactgcaacctccgcctcccgggttcaaacaattctcttgcctcagcctcctgagcagctgggattacaggcgtgtgccaccacgtccagctaatttttgtatttttagtagagatggggtttcaccatgttggccaggctggttcaactcctgacttcgggatccacccgcctcagtctcccaaaatgctgggattacaggaatgagccacagcgctcggtctgtatttaagaaaaatttttgttttaagttttttttctttttaaaaatatatctttttcagggcgggcgcggtggctcatgcctgtaatcccagcactttgggaggccaaggtggggggatcacgaggtcaggagatcgcgascatcctgactaacatggtgaaactccgtctctactaaaaatgcaaaaaattagccgggcatggtggcaggggcctgtagtcccagcgactcgggaggctgaggcaggagaatggcgtgaacctgggaggcagagcttgcagtgagctgagattgcatcactgcactccagcctaggggacagagcgagactccatgtcaaaaaataaaaataaaaaaatatatatatatctttttctttttctgagatgaggcttrcactgtggcccaggctggagtgcagtggtgagattattgacagccgttgtggggccgcggttctaagtttaaaagaatttaggctgggtgtggtggctaatgcctgtcatcccagcactttgggagtccaaggtggatggatcgctttagctgcaaagtttgagaccagcctgggcaacatactgagaccctatctaagaaaaaaataaataaataaaataaaataaatgaataaaaaagaatttaaaaaagaatcccacagcaaagacaatgcaccatagagcaatttattgccaaggaaaggtattttggaagttaagtttagaacagcctgggtgcactggctcatgcctgtaatcccagcacttttggaggccgagatgggtggatcacttgagctcagaagttcaaaccagcttagccaacattagctggacattgtggtgtgagcctgcaatcccggctactcaggaggttgagatgggagaattgtttgaacccgggaggtggaggttgcagtcagctgagattgcaacactgcactccagcctaggtgacagagtgacacccccatctcaaaaaaaatagtgaagtgcaaaatgcacagttcaccctgagacacagaattcaggacaggctgctcgtaaggatgagacagcaccgattattactggggaaactccctttctgggagtcttccgtgatgaattcctaaggagctgggaagaggtgttactgtaagcacgttctgggccgtcctctggttgcacatgcgtagtagctgtacatgcttgttcacacgtcacgtgtctcagtgccgtggttggcatgtctgagggacacggtcacttccttgactacctatcctgcctcaagatcatagctcactgcagccccgaactcctggctcaagcaatcctcccacttcagcctcccaagtagctggggctgccggggctgcaagcacgcaccaccacgaccggctgattgtttgtatttttagggaagaagtggtttccctatgttaccccaggctggtcttgaactcctggtctcaagcgatcctcccaccccagcctcctcaagtgttgggattacaggtgtgaccactgcacctggccaaaatctttttttaaattaaaaaaagcaccgggtgcggtggctcacacctgtaatcccagcactttgggaggccaaggcgggtggatcacctgaggtcaggggttcaagaccagcctggccaatatgacaaaacccatctctactaaaaatataaaaattcgccaagcatggtggtgcacgtctataatcccaggtacttgggaggctgagacaggagaatcacctgaaccccagaggtggaggttgcagtgagccgagatcatgccactgcactccagcctgggggacagagtgagactccgtctcaaaaaaaaaaaataagaaattaaatttaaaaaaagcaacagaaacaaatggctgcctggcagcggtggctgcagggcgctcctgtttgtgtgactcaggtcgtgtccctccctcagccctggtctctcttgtttcttgcagggctggtgaattaccagatctctgtcaagggcagtaacctgttcaagttggaagtgcgtcttttggatgcagaaaacaaagtcgtggcgaatgggactgggacccagggccaacttaaggtgccaggtgtcagcctctggtggccgtacctgatgcacgaacgccctgcctatctgtattcattggaggtaatggtggtttgggacatgcctaagggaggtcttttgcccccatgtggtgaccctggcttcagcaggagcccaagacaggtggatgggcaggcatggtcctctgagctttctgatgtttctcacccttggtgggaggcccattttcttttttttttttttttttgagatggtctcactctgtcacccaggctggagtgcaatggcctgatcacagctcactgcagccttgaactctcagcctgcagcagtcctcctgccttggcctcctgagtagctgggactacaggcacatgccaccatgtctggctaaataaaaaaaattttgtagcctgggcagagtgactcatgcctgtaatctcagcattttgggaggctgaggtgggtggatcacttgaggccaagagttcaagaccagcctggccaacatggtgaaaccccatctctactaaaaatatgaaaatttgctgggcatggtggcgaacacctgtaattccagccactcgggaggctgaggcaggagaattgcttgaactcaggaggcagaggctgcagtgagctgagatcacaccactgcactccagcctgggggacagactgagactgtctcagaagaaaaacatttttttttkatagagatggggtctcagtctgtcascaggctggtcttcaactcctggactcaagtgatcctcctgccttagcctcccaaagtgtgggaactccaggcatgagccaccttgtcttgtcaaagggaaggccatgttttgaagggcaggttcccagggtcagccagggtagggcagaacctctgattgctgcatctctgcttacaggcccagaggcagctgctggggtgcacgaggggccttcctgctggagggcaggccggatggggctcaggctgtcggggtgctcacacctggtgctttggctgtcataggtgcagctgactgcacagacgtmactggggcctgtgtctgacttctvcacactccctgtggggatccgcactgtggctgtcaccaagagccagttcctcatcaatgggaaacctttctatttccacggtgtcaacaagyatgaggatgyggacgtgtgttggggctcctgggtccttgtsggggctgcttctggtcaccctccactttcgccttccctgtgtcctgcagttgagggcagctcagggcaatgaggcaaatggctccaaatggagagggggctcatggggtggctctccagggtcctggctctcagaggaagtgcagcttcgacagggacaggggtcacttggctctgctatctcctagatcygagggaagggcttcgactggccgctgctggtgaaggacttcaacctgcttygctggcttggtgccaacgctttcyrtaccagccactacccctatgcagaggaagtgatgcagatgtgtgaccgctatgggattgtggtcatcgatgagtgtcccggcgtgggcctggcgctgcygtgagtctctgctgtgcacctgctccgcctgcccagcccgggggcgtcaccgtgaccctctgtcccttccctcctggcccgcaggcagttcttcaacaacgtttctctgcatcaccacatgcaggtgatggaagaagtggtgcstagggacaagaaccaccccgcggtcgtgatgtrgtctgtggccaacgagcctgcgtcccacctagaatctgctggctactacttgaagtgagtgctccctccctgccctcggctagagtgggaaggagaccctggcaggtggctggcctcggtgggcatgtgctgttcaagatcggcctcgtgtccagcccaatgggaaggccgtccatacccagatagttcaggggaccaaatatctacccacccaaattgtggttttcttttttgttctttttttttctttttgagatggagtctcactatatggcccaggctggagtgcagtggggtgatctccgctcattacaacctctgcctcctgggttcaagtgattctcctgcctcagtctcctgagtagctaggattacaggcacccatgaaccactgtgctggggctgtttttttttttcaaaatgggttctcactctggttgcccaggttggagtgcagcggtgcagttttggcttactgcagccttgacttcccaggctcaggtgatcctcctgtctcagcctcccaagtagctgggattctagatgtgtgtcatcacrcccagctaatttttgctttattttttattttttggatatgcagtctccctctattgcccaggatggagtgcaggggcatgatctcagctcactgcaacctctgccgctcaggttcaagtgattctccagcctcagcctcccgagtagctgggattacaggcacatgccaccacgcccagctaagttttccttttttcctttttatgagatggagtctcactccgyggccaggctggagtgcagtggcgcaatctcgtctcactgcaaccttcaccttccaggttcaagtgattctcctgcctcagcctcctgaggagttgggattacaggcacacgccaacataccctgctaatttttgtatttttagcagagacggggtttcaccattttggctaggatggtctcgatctcttgaactcatgatccgcctgcctcggcctcctgaagtgctcggattacaggcgtgagctaccacgcctggccaacttttgcatttttcagtagagacggggtttcactatgttgggccaggctggtcttggactactgacctcaggagatccacttacctcggcctcccagagtgctgggattacaggcgtgagccaccgtgcccggctaattagagactgggtttcaccatgtttgccaggctggcgtggaactcctggcctctagtgatcctcctgcctcaccttcccaaagtgctgggattacaggtgtgaaccaccacacctggcccccttttcttccttacaatcgtgcagttctaactcagcgttcagagttggatttttcacttggggtagaagcaggagaggtggtagaaatgcctcttgactcatacagcacaccccaatttcatgcagtgctttgggctgagccaagtctgcagcaggcagaaggctctgagaagttgttgcagcctgggccaaggacaattcagagcttgggggyacaggggtgtgctcagcaggactgggtggacaggccctttgttgcraaggggaagagtacaggcttccaggagcaggtgtttgaggcttctttgggaggtggccagaggagatgcctgttttctggggcaggatttggagggagccacccaggctggagaggttcagccaggctgtcacaggctttgaagtttcccatctgagagcctggctgttggagagtgtgggtttggaacttgaggctagggggttcttttctsatctgtgccagccacagccttcggataggcagagcaatgatgggggagggcgtaaaagaagaaatgaactgaggaaagagaagaggaaaacaggcttcaacaacagtctaggctgggtgcggtggctcacgcctgtaatcccagcactttgggaggccaaggtgggtggatcacctgaggtcaggagtttgagaccggcgtggccaacagatattgaaaccctgtctctactaaaaataaaacaattagcggaacacagaggtgggcgtctgtaatcycagctacttgggaggctgaggcaggagaattgcttgagcccaggaggtggaggttgcagtgagccaagatcatgtcattgcactccagcctgggctacagagtgagattctgtctctcaaaaaaacaaaaacaaaaacagtctgtactgtggaggcctcgggcaggtgccaggagctctgagcacagaygggtccctctgttgggtttttcttcccttctaagggccatttcttcttatttatttatttattttttgagatggagttttgcacttgttgcccaggctggagtgcaatggcacaatctcggctcaccrcaacctctgcctcctgggttcaagtgattctcccgcctcagcctcccgagtagctgggattacaggcatgcgccaccacgcccagctaatttgtatttttagtagatatggggtttctccgtgttggtcaggctggtctcgaactcccaacctcaggttatctgcctgcctcagcctcccaaatagctggggccacaggtgtgtgcggccatgtcaggctaagtttaaatttttttttttttttccgcaagatggagtcttgcttgttgcccaggctggagagcactggtgcaattttggctcactacaacctctacctcctgggttcaggcaattcttctgcctcagcctcatgagtagctgggattccaggcgcatgccaccatgcccagctaggttttttttgtatttttttgtagagatagacttttaccatgttgaccaggctggtctcaaactcttgacctcatgatccacccgcctcggcctcccaaagtgttgggattacaggcgtgagccaccatgcccgcccctaatttttaaatttgttgtagaaacaaggtcttgctatgttgcccaggctggtcttgaactcctggtctctggtaaaactcccaaagtgctgggattctaggcgtgagccgccttgcccggcacttgcaccatttctctgcatgcgtctccactcccactgcccaggacctgtggacttagatttgagtcactgctgagcacctcgcacctagccccatgcctgcctcccagcctgcactccgtttgcttgatgcattaataaatatccctcccaaatctgcatccatccacctcckgtgttcaagagctgtttcagggcgtcaacctcatttttgccagtgtccagcctagtgacctcagctctgtgtacctggaagagtggctgctcctctgggggtataggattcggagatgggggtagaaggagtgatgttagagagctcggtctaggactagaggatcatatgcccttatgtaaaatacatctcaagttarggaagaaagcagcggctccatgcttttttttttttcccctttgtttttgtttgtttgttttgagacagggtcttgctctgtggaccaggctggagtgcagtggcatgatcttggcccactgcagactcctccttctgggttcacgccattcttctgcctcagcctcctgagtagctcagactataggcgccggccaccacgcccggctaattttttgtatttttagtagagacggggtttcaccgtgttaggatggtatcgatctcctgaccttgtgatctgcccgcctcggcctcccaaagtgctgggattacaggcgtgagccactgcgcctggccgctaatttttgtatttgtagtagatagagttggggtttcaccatgttggccaggctgatcttgaactcctgacctcaagtgatccacccacctcggcctcccaragtgctgggattacaggtgtgaaccatcgtgcctggccccgtgttgtgttctggcggtggaagatgggacagagaggatgggagggtgtctgagccattcctggactgatggaacctgtttcttctgccttttgtggacaggatggtgatcgctcacaccaaatccttggacccctcccggcctgtgacctttgtgagcaactctaactatgcagcagacaagggggtgagcctgggggtccccaccccacttctccctgcctttgcctgggcttgtcctgaagcctggtcatgggaacagccaggaagaaccatgcgctgccagtctgggttttatttcattttcttttttacttaaaaagatagagacagggtcttgccatgttgcccaggctggtctccaactcctgggctcaagcaatcctcctgccttggcctcccaaagggctggggttacaggtgtgggccaccacaccccggccgcagccagtctgttttcacagatggtctttgggttaatgagaattctccccctgcttactcgccaggcagtgtggctttctcaatccaaggaggctgggcatagggagatgggatttgtttgctcagtttggactcagcattttttgcacttcgatttaatagactcataaaacatcaaagatttaagggagcttagagttcatctggcccacacctggctgatgagaatctctaggggaagtttttatgaaatgccagatctctgcattctgaggtcctgatttagtacgtccagggttggaacttgagtttttctttttcttttgtagaggcaaggtcttactctcttgccctggctggagtgcagtggtgcaatcacagctcactgcagccttgaattcctgagcccaagtgatcctcctgcctcagcctcccgagtagctgggactccaggttttcaccactgcgcctagctaattttatatctttttgtagaggtggcatctctctatgttgcccaggctggtctcaaagtcttgagctcaagtgatctcctgccttggcctcccaaagtgctgtgattacaggcatgagttgcagtgcctggctgacattagcattctttatttatttatttatttattttgagatggaatcttgctctgttgcccaggcttgagtgaaatggtgcaatctcagctcgctgcaacctcgtcctcccaggttcaagcaattctgcctcggcctcctgagtagctgggattacaggtgcatgccaccacacccagctaatttttgtattttttagtagagatggggttttgccatgttagccaggctggtctcaaactgctgatctcaggtgatctgcccactttggcctcccaacgtgctgggattacaggcgtgagccaccacacccggccagcatttttactagaaagaaatgtgttcaggacgcattagaaactagccagttggacacagaagcccctgctgctcagctgtaagcaccgctatgctgaagcttggggtggtcctactcggtcgtcaccgccctgctccttggagtgacttttctggccctctgcagtccacagtgctgccttgtgaaagctccctcaagatcctctgtgacagccgggcatggtggcttacacctatcatcccagcactttgggaggccgaggcaggcagattacttgagatcaggagttcaagaccagcccagccaactggtgaaacttcatttctaccaaaaatacaaaaaattagctgggcgtggtggcgcacgcctgtaatcctagctactcgggagactgaggcatgagaagcacctgatggtgggaggcagaggttgcagtgagctgagatcgcaccactaacattctagcctgggcgacagagcgagactctgtctccaaaacaaaacaaaagattttctgtgagaatgactgcatcggcccctcgggtggcagcgcttctccagggcaaggtgaggggaagcccagtgatgggagtgctgcctggagaggagtcagttccagtggtgggggccctgggctttggctgagggctgtgcgttggcagctgctgtgcctctcacagcccttcccagcggcgcacgtcatgagtgtcagtgtggagtcccaggcctacctcctctgggccactttgtgaccatgtttcttgcctatggcagggtaatttcaggatctaaattggtacacttggacgttctcagccccaggaggcagctgttcccgttctaggttttttttttttttttttttttggtagaaatgggggcttgtgatgttgcccaggctggtctcgaactcctgggatcaagtgatcctcccatcttggcctcccaatgtgctgggattacaggcatgagccaccgtgccctgctaattttcttactactattttttgtaatgctgcagtcttgctgtgttgcccaggctggtcttaagccatcctcctgcctcagcctcccagagtgctgggattacatcccccttaccttctctgccagaggagccccygcagtgtgtgaatgctgagtcatgctgtctactgagtgctgaacgggctctgctgctctggtcctaggctccgtrtgtggatgtgatctgtttgaacagctactactcttrrtrtcrcgactaygggcacctggagttgattcagctgcagctggccacccagtttgagaactggtataagaagtatcagaagcccattattcagagcgagtatggagcagaaacgattgcagggtttcaccaggtaagcagtgttgagctttctgcttgtgtgttctctcagggcagagatgtcactcacctcctccagcctgacctgcgcccactgcactgctcccctcgcttcagctttgggctctcctcccacggccccgtccacgttccctcaccgccarcagccaggcctgtgccccactcrcttggtcctcagaggtggcctccttactggctttgtttccagatagcctcctatcacccgtgcccaagtggtctttctaasagatccaaatttgtatttgtttttgagaccggatctctctgtcacccaggctggagtgtggtggtgcgatcactgctcactgcagccttaacctcctgggctcaagtgatcctcccacctcagcctcctgagtagctgggaccataggcacatgccaacacgcctggctaatttttttacttttgtagagatggggtcttgccatgttgcccagactggtcttgaactcctggcctcaagtgatctgcctcaggctcccaaagtgctgggattacaggtgtgagcctctgcaccagccacagttgaaaattttgggagtcctgtcattggctcccccaggcccacaggacaaagccctaacctctggtcaggacactcagtgtcctctgctctctcctgggttttcatccccttctcccctctatcccagccactgatctgtttccactgccctcgcttgctctcctgctcttgcttgagctgtttcttctgcctggaatgcccatgttggcaccataatcaccaactaaaatatcctttttcttaattttcatattttagatatagggtcttgctatgttgtccaggctggtctcaaactcctggactcaattgatcttcctgccttggcctccaaaagtgctggaattacaggcatgatccactgtgctagcctttttttctttttctttttttcagggtcttgttgtgttgcccaggctggagtgcagtggtgtcatcatagctcactgcagccttgaactaaagggctgaagtaattcttccacctcagcctcctgagtagctgggacgacaggcatgaaccaccatgtgcagcctatttttaaatttttttgtaaagatggagtctatcaggctggtctagaactcctggccttacgtgattgtcctgcctcagactcccaaagtgctgggaatccaggcatgagacaccatgcccagcctgtcrtcatttttttaatctatctcatttttttgtcctcctcaccaaagatatgttggtttgtcttgtgaggttttttttttcctgtggattcctgaaccccatccagcccctcattcccaccccagccagctcacacttgtttgtcacagctcctggttgacacacagggaacagccacccacagtggactgcgctgttctgtttgcacccttaaatttatcgtgcttacagaatgccacttctgcaaactagtcaagtaggggaagtggctcttggatatatttgcttgcgcatcctctttgaaaaggtaaccagctctgaattctttttttttttttgacacagagtttcgctctcgttgcctaggctggagtgcagtggcgcgatctcggctcactgcaatgtccacctccctggttcaagcgattctcrtgcctcagcctcccgagtagctgggattacaggcatgcgccaccacgcccacctcattttgtatttttagtagagatgaggtttcaccatgttggtcaggctggtcttgaactcctgacctcaagtgatccgcccgccttggcctcccaaagtgctgggattacaggcatgagccaccgtgccaagccctagctctgaattcttaagaaactcttgagagggtctaggtcagtgctgatagaacctctgcagtgctgggcatggtggctcacacctggaatgctggcactttgggaggccaaggtcagaggatctcttgagcccaggagtttgagaccagtctgtgcaacatagaccccatctctacaaaaaatttaaaattagttgggcatggttatgagtgcttgtagtccaagccacttgggaggctgaggtgggaggattgtttgagcccagtaggtcaaggctgcattcagctatgattgcaccactgtactcccacctgggtgacagagtgagaccttgtttcaaaaaataaaaaaaaacaaacttgcaatgatggaaatgttctatatttgcactgtctgaaatggtacacactagctacacatggctactgaggtcttgatatatgactaggataactgaattgatttagtttaattaaataaatttttttgagacagcctcactctgttgcccaggctggagtgcagtggcataatcacagctcactgctcaacctcctgggctcaagcgatcctccctccttagccccaagtagcttgaactgcaggcgtgcgccaccacacctggctaatattttgactttttgtagagactgggtctcactgtgttgcctagactagtcttgaaatcctgggctgaagtgatcctcctgtctcgacctccaaaagtgctggcattacagacctgaggtaccatgcccagcctggtttggttgagtttaatttaatttaatttttatatatatatatatatttattagagacagggtctcactgtgtcacccaaactggagtgcagtggtgtgaacacagctcactgtcgctttgatctctggggctcaagcagtcctccaacctcagcctcccaagtagctgggaccacagatgtgtgccactaggcttggctaatttttgtactttttgtagagatggggtcttgctatgttgcccaggctggtcttgaacacctgggctcaagcagtcctcccacctcagcctcccaaattgctgggatgacagacatgagccactgcacctgactgaaagacatatttttgcctgtagtgtagtttagccttaagactgtaccagcagatagaggtggaaaagtaatgtgaaacgaatgtcaaattacgtttataaataaagcagctgctcattaaggttgtttttttttttaaacctccttttttattctgggttacatcattccctggctgtctttaccccagcatcagtgagtcctgcagtcactatagccccctgtgaagacagatattttggtcaccatcaagtggatctttatttttatctaacatttacaattctgccagttctgactcttacattctctttgccttgaatcctaggatccacctctgatgttcactgaagagtaccagaaaagtctgctagagcagtaccatctggrtctggatcaaaaacgcagaaaataygtggttggagagctcatttggaattttgccgatttcatgactgaacagtgtaagtggcagtttggctcatgggataacgtacccgtcctcattttttcaggttgcctttccaattctggccatttcaattgtaagaatattggaaacaaagttggggaagctggtttaatccatgtaggttgcgttgagaattttctaggaaaagtaagttgtgtttaggaagtaggaaagcaatcaggcccccgcctcccaaatacggtcaaaaagcaaacaggagagtcagctatagtgaatcggaaatggctggcttgccttttccttgtctattttgtagccaaggaggaasgaaaaacgggacctcatcatggatttacttttgggatacactcattattccatagaagggtacaaagcctgagaaacttaaggtatttcagtctgttgtatattacttgcgaaaagcaggcttatcaaatacaggtgagtttcaacgcatcttgaatttggcagcatttacaagtcttcaggccaggtgtrgtggctcacgcctgtaatcccagcactttgggaggtcagggtgggaggatcgcttgaggccaggagttcaagaccagcctgttcagcatagcaagaccccatctctacaaaaaataaacagattagctaggcgtggtggtgtgtgcctgtagtctcagctgcttgggaggctgaggcaggcggataacctgagcacaggagttggaggctgcagtgaactatgattgcaccactgcacaagagcctggacaacagagtgagacttgtctttaaaacacaagattggtcttcaaagagaataacatctgcggtgtcttgtgaggatggatgaggggctgccaagttcgcaatgaatgtgtcccatttcttyttagtttatggacttaccataaactgaagatagcagtttggtgggttggagaagcatgtggtaatggtgggaattataatacattacttacagggaaagacaggcctttgaaaggtaaagcgtaagagtgagaatggaatacggatgaatgaatgaacaagatgaggtgagaaggaagaggtaaagggaaaaggagaacaggaagctgtcctctgcgtggcacctgtgataaatggtttctrgggacatccctgatggcagttttgtggagaggtgcgaggctttatgcggtaagaaatgagctgcaggctgggcgcagtggctcaagcctgtgatcccagcactttgggaggccaaggtggacagatcacctgaggtcaggagtttgagaccagcatggccaacatggagaaaccccatctctactaaaaatacaaaattagccgggtgtggtagcgcatgcctgtaatgccagccacttgggagactgaggcatgagaatctgttgaacctgggagatggaggttgcaatgagctaagatcacagcactgtactccagcttgagcaatagagtgagactcttttttttttttgagacggagttttgctcgtttcccaggctggagtgcagtggcgctatctcagcctactgcaacctccacctcccaggttcaagcaattctcctgcctcagcctcccgattaactgggattgcaggcatgcgccaccacacccggctaattttgtatttttagtagagacggggtttctccatgttggtcaggctgggcttgaactaccgacctcaggtgatccgcacatctgggcctcccaaagtgctgggattacaggcatgagccaccatggccagctgaaactcggtcttaaaaagaaaaaagaaatgagctgcatcacgttgggcaagtcacctaagcttttcataagcctgtccagtggggataatgccacctccttgttggtgtcgtaagggctgcatttgatgaagtacttggcgatgcctgtgttcacttatggaagaaacagtcttgaaccttttggtggggaaagccccctttccatttaacatttccatttagtggtggtcttactggggacagagaatgtcctgagagcacagccctgacaggtcgttgccagctgtgctcctccaccaggctcagctcaggcctaatgaccaccagtggtgggtgctgccaagctggacgtcagccccggcggactttgaactccatgagtaggtcccacgcagggacctgtggctggtcaggaccctggctcccactaggcgctatctcttcagaaaggcccaaggcttttcaagggtaactgtcccagatacccctagccctctgcctacccagttaccagacasctgggtacccagcatgtaaaccttagtttgcaaataaaagataaacttttagtgctttttttttttttggagatggagtctcactctgtcgcccaggctggagtgcagtggcacaatctcagctcactgcaacctstgcgtcctgggttcaagcgattctcctgccccagcctcctgagtagctgggaccacaggcacccaccaccatgcctgtataatttttgtatttttagtagagatgaggtttcaccatattgtccaggctggtcttaatctcctgaccttgtgatccgcctgctttgtcctcccagagtgctgggattacaggcatgagccaatgtgcccagccagtttttgtatttttaatagaggcgggtttcctcatgttggccaggctgatcttgaactcctgacctcaggtgatccacctgcctcagcctcccaaagcactgggattacaggcgttggccaccacacctggccactgttttgggtttttttcccctaacagactagaaaactagaaattaacacaccagggaacctgggtgtttgggcagagcagtggtatttaaatatttcaacccataaattgtcacttcagagcaagcatcctgaaactgtaagaggacatttggctgagcatggtggcttgtgcttataatcccagcactttagggaggctaaggagggcagattgcttgagcccagtagtttgagaccagcctggacaacataatgagaccttgtctttactaaaaaataaaaataaaagattaccgggcatggtggtgctggagaggctgaggcaggaggattgcctgagcccaggaggttgaggctgcagtgagctatgattgtgtcaccgcattccagcctgggcaacagggagaaaaaagaaaaaaaaagacatttctatttagtgcctaccttagctccagactggttctaacttgacccatcagaagacatctgaatcgctttgtgtcttttttttttttttgtagcaccgacgagagtgctggggaataaaaaggggatcttcactyggcagagacaaccaaaaagtgcagygttccttttgcgagagagayactgkaagattgccaatgaaaccaggtatccccactcagtagccaagtcacaatgtttggaaaacagccygtttacttgagcaagactgataccacctgcgtgtcccttcctccccgagtcagggcgacttccacagcagcagaacaagtgcctcctggactgttcacggcagaccagaacgtttctggcctgggttttgtggtcatctattctagcagggaacactaaaggtggaaataaaagattttctattatggaaataaagagttggcatgaaagtggctactgaaaagcatctgaaatcatttctgtgcgtcgtgctgttttcagagctttaactgtgtgtggacttttgagaaactgctgctccaacacccccaccacgttcagagcagctggttcccgagggcgtctgcaggaatagccccatggtcctagggccaccgtgtttgtgtagcaaaccaggccagcctcgacagggagtgagtagaagactttcacagctgctgttcgactcctcagatgagctaaagtcccacatgtaccaacaaattcatagaaacgctgtcattgttgcagcacttaacagggtctgtgtgccagtttctacatagttaagctggcagtgtctgaattggaaggttagaggtaactggttctcccagaacattgttttgacctcagccatagggtcttgacagaaatggacagatgagtgtaaaagcctattggctttatcataacggatgccactgaatgtgacaggacctccttaaacaactttgcctacaaatcagcattccatgcctttacaccccaaaatgacgctacctgccccctcccagagcacagtctttccttaaggaatctgtcctccctctcttcctgggctccagtaaggcaaggatggtgcatcaattctgatttgaagtatacgctttggaaaaatactccttttggtgtccagtcagttgaaagacaatgaaccaatacagtttgttttgtttgttttgagacagtcttgctccgtcgcccaggctggagtgcagtggcgcaatcttggctcactgcaacctccacctctggggttcaagcaattctcctgcctcatcctcccaagtaggtggaactacaggcatctgccaccattcccagctaaatttttaaaaatatttttagtagagatggggtttcaccatgttggccaggctggtttcgaactcttgacctcaggtgatctgctcgcctcagcctccccaggtgctgggattataggcgtgagccactgtgcccggcctccaatatggttcttgctatagaacttgattttcccctctcttgtggttgagccccgtgtctccacacagaccctcctttttagctttcctgtgcaagctccatgaaagaaagaataaagttaatttcatgtggttttattaggcatcgtccattttttaaaaatgagtgtagtcagttccaattaggaatctagagcttctgtattttttttatcaacttctctttagtttttcaaaggaatcaagttttgtgttccagtatgtcaaagtataatgaataaaacttttagttgacaaacattaagaaaagttaaatgtaatagacacatttaaatggtttacaaattaggggcagtccattgttttttttcttgagctggagtcttcctctgtcgcctaggctgcagtgcagtggcgtgatctcgtctcactgcaacctccgcctccctggttcaagcaattctcctgcctcagcttcctgaatagctgggattacaggcgcacaccacaatcctggctaatttttctgtatttttcagtagaggcaggtttcaccatgttggccaggctggtcttgaactcctgacctcaagtgatccacccgcctctacctcccaaagtgctgggattacaggcatgagccattgcacccagtgggggcagtccctttccacaggtcttgagctccagcacagaacacacttgttctattccgtgaagtatggctcagctgtatttccaacggattcatctttcttgccgatgctacctttttagaggattatacagggagtattcaaggtaagctaaagtaaaactatggaaaaacagctcattaatacattctgagtgttcacagaactgtaggcagtgacacatttttgtcattaattcttgacaatcacatacaccgtaaacctacaggaattccaagaactagaggtctgaggactctgaatcttctgcaagttacatatgatttaagagaaaaagaatcaaccctgtataccttagaaatgaggttacagtattgacttcaagaatataaggctcctactgagtctaaaaagacttcgtttcagttcttttggaatgcaaccctgcagtttaagaataatgggagcacaacttccacaggtaacttctacatttattttataccaaaaaagttatgtgcaacaaataaacattcttacatatttacatttggttttatttaccagttagcaaaacagtgccttaaatctctgataaagagtatttctatctagattaaaggggaaacctgcccagtgaactccattttaaatgactgtttactctggagcttaaagcactagtaagaaatatttctgatggaacatactacacagatcatatacctaataaatacttaggccatgcttaatacagttttataacaaaatatttcaccttttctgggcgaatttgtagtaaaaaatgtttaaccaagtagccggggctcccacccttgccctttttgtttgatggaagggtagttctcacaattagaaaccataagtgctgcctgaggtgtctgaaatgtttcacccatgactgtgtgttagagaaaaagacacgaggacagaaattgcatattaggtcattaggtctttttccccaaataggttaccagaaatcacagtgggtctccttgttggcatctaataatgatcttccaagacaagatctcctgtcactcttggtaccaatctaagttgtgaagtaattgctgaagataactctgtacttttgcaaatagtcttttccaaaactaaatgaaaaacaaaagtcaacaaatagtttttatttttatttttttatttgagacagagtttcactcattgcccaggctggagtgcaatggcgcaactgtggctcactgcaacctccacctactgggttcaagcaattctcctgcctcagcctctggaggagctggcattacaggtgccgccaccatgcccagctaatttttgtatttttagtaaagacagggttccactatgtcggtcaggctgatctcgaacttctgacctcaggtgatccaaccgcctcggcctcccaaagtgctgggattacaggtgtgagccaccatgcccagccagcaaacagttttaatttcactgtagtcttggtcctctttgaatgcagtctctctcttttttttttkkgggggggacagtctcgctctgttggccaggctggagtgcagtggcatgatcttgactcactgcaacctctgtctcccgggctcaagcaattctcctccctcagcctcccgagtagctgggattacaggggtgtgccactgcgcctggctaatttttgtatttttagtagagatggggtttcactatgctggccaggctggtcttgaactcctgaccttaggtaatccacccgcctcggcctcccaaagtgctgggattataggcgtgagccaccgtgcccggccgaatgtagtttctttgaatgaaaatagtcaatgctttgaacatcatttgaaagtaatgaatttaaggagaggacacatgtatgaaggaacagtgattctgggcacacagctagttaaacctgagttatttcaccggaaatttacctttagtgagagcaactagctgtaatgcaaaacaaatgaaatcctccaaatcacctagattccctagaatttatcatctaaccccaattcctgttatttcttcaaatgatatttgtgaacatcaagtcaataaatggcttcatttggaacaaatcacttaaaaaagatgaggcatggaattactgctaaaaacaaatgtttcccctcatctgtcctttaacactggtggctagtaatgctgcagtgttcaaatattcagtctaaaacaggcaaaacaatcttctaattttgtaacactggtgattccccccctcttctgggcagaatcggaggtatagaaaggaatctgaattctccagggcaaaaaacacccaattaacacccaccaggattctgttactgagacactggcattacaatgctgttatgacaggcagtacgtgttcctctctcagtgagaaaaagggtattaattcgactgggccataggaatgtggcaaaagtttttatacaactgaaacagtggtttccccgaggcttagaaaagcaaaggaaaaactggaagggtctggctgaccattttgccatgttttctcaggtaagagttgaagacatttgcaagaatgcaacatcaagacaagctttaactatactctgttgattgatacaaaataggatgaaaaaccattggatattgggacacgaggaacttgtttagcacaaccgatgtcatgtataccacagttttaaccattaggccatttccactgtagcttagaaaaaagaaccagaggactgccttggtagagctggatgcgctgctacaagatggcctcactgtacagccctcaaacgtgaggacttctttctccatagacaccagatggccaatcagtactttctagagttctttaactwcttcagaatgcaagaacagtacatacatactccaacagccattgaaagattcacattcatgggaaaacacaagtcttgatgaaatcttgacttaagctctcttttaagaaactggttgaaactggtgaaaagttcattatgatttggacttgatacctgcctcgggccagaagacctacgttgcatcaattctgagtcagttggaagctacggaattgttgctgactctacacatttgagtttacagagcagagcccgtcccctcccttcaaagagaaggcaaataaagcactcaagagatactggtctcattgactattttcaacataaaatgattaatcaggttggaagcaaaaacattactgctgcttctcaaccagaggattaagtgatcacacaggacccttctgcagagtgcaggttttctacctgacggtgaagaaaggagggaaggacacttcttctgcccaaggtcaacacacaaaatatttggtttgagatttaagacagaaggcacttttaacattctgatatcagatgttaaccatacaaacatcctgtcacaatttcatttgggtgtactcaaatccccttacaaaagtcttcttactgcatgtgtgtcattatgagagcagtggcgacatgagcagatttagccttgagatgtgtctacctgttgctattctcccgatgaagcaaactgggcagcatgtcagccctgaaggttacaaatccagtatttgactgcaaaacaattaaattagacatctgagtggttagtgcagaaagaaacaattagcaagaacactggctcccactccggagcgatggggcttggactggtcttttccatcataatactctttgcttgactggcaccaacgttaaggaaaaatatctgcatgaaaattcaactagtggaagaaactttacctaaaaatgccatgtttatatttccagcttttctccaaagaaaaatacccattttcccatccttagtgtctgaaggccttggacttgaaggtctggccacatgactcattctgtaaggttaacaactggcccagttttatgactgaacacaaactggacttgaacgttccaattcaattttttcctttcagaagagggagatgaaagggaaccgaccaccctattattattttttttgccctattatttgctgcaaccacggctgccagtacttttcacaagatgctgtgtataggctattttcactatctcctcagtcaacgctgagctgacagttcttcagtgctacactccaactaaactgtacagtaagttctgcagaaatggatctaatatttctacctttatttacaaatatcacaaatggattctagttgaatctacatgtttaaatccatcggctaaaaacatattacatattgtaaacatggcaatatttaatacagtatctattctaga

SEQ ID NO: 94221 - DNA, 25901 bp, Homo sapiens
  misc_feature (1)...(25901): n = A,T,C or G
atcttcacagctgcaatcctgtccatcatctctctgcaatcctgtccatcatctctctcctagacaacatcagcaacaatgcctaataggcattgttgcttccacaatgacccccataatcaactgtcccttggtggaaggatctttcaaaagcataaatcagatcatgtcgctcccctgcttaaaatcctctaacgaaccattttatctgtaaatatatattcctcctgtctctgtcctctataaaaatctggaaacaatgactgacccagtagcaataagtattgctagcacctagattgtagtgttgaattaccttctccctaatattaaaaggagctgggacttttgtacatggctgattccaggactggggcaaaaaaatggacaaaacgagccagaaatatcttgccataacagaaagcaaggaatctatcaaagattactagagtcatgtcaaagggactcagaaggcaaatcaaaaagattcccactaaccaaagatgggacactttgagctttaatggacacagcactgtaattgcaatggactggaaccatcaaataggctgaaatccatgacttcacaatgatgctgaaaatacaataatagctcacttttggagagtgatagaaacaaatccattatcttgaacactgataactgaagggggcaaaatcaagcatgtagccttttctacattaactataccactgattaacaaataattgattaggggaagcatctcttcataaaaagactccgattaataaacgaaaaagagatgacagaattaacatatcaccatgttgcaccttccagtgcgttaacagatgtaggcattatgttatcggggctgctaggatcacagaaatacagacaaccatacattgatgtaccctctggtgaaggggtatctatggtcttgccaaagagattcaaaattgtgtctaatcaaatctccacatccaggtgctaatttgcatgaaatagagaagacagaggaacatgttgaatgtgagttgaatgtcgaatatggagtcagcaaaaacttagactgtgggaaaccacagatcaaatctccgtagctaagcagtagatacactgtaaggaaaaggatggagatggaacctattgataaaaagacttaaaatatcaagtcgatacgcttttttaaaaaacgtgcaagactataacatctaaggatgtacatttgggtgataaactgtaaagaaatgcaatgcaggctgaactcggtggctcacacctgtaatcccagcactttgggaggctgaggtgggtggatcacctgaggtcaggagttcaagaccagcctcgccaacatggtgaaaccccatctctactaaaaatacaaaaattagccaagcgtggtggtgggtgcctgtaatctcagctactcaggaggctgatgcaggagaattgcttgaacctgggaggtggaggttgcagtgagccgagattgtaccattgcactccagcctgggcaacgagactgaaactctgtttcaaaaaaaaaaaaatgcagtgattactatgaaagtcagggtaatggtcacctttgggagaaggaagstggttgggggcagggcagaatccatggaggggccctggggtggctgcaaagttctatttcaagacctgggtagtggatacaaagatgtctgcctttgaatcaacaacattgaaacaagtcaacatttgttttggttgattttctgcatctacgttttatggtgtgatttttaaaaaatctctattgcagtgtttggcaaactttttttgaaaagggccacgtattaaatattttaggctttccaggccaagaggcaaaatcgaagttgttatgtaggtatttctttttttagtatttattgatcattcttgggtgtttctcggagagggggatgtggcagggtcataggataatagtggagagaaggtcagcagataaacacgtgaacaaaggtctccggttttcctaggcagaggtccctgcggccttctgcagtgtttgtgtccctgggtacttgagattagggtgtggtgatgactcttaaccagcatgctgccttcaagcatctgtttaacaaagcacatcttgcaccgcccttaatccatttaaccctgtttcagagagcacggggttgggggcaaggttctagattaacagcatcccaaggcagaagaaattttcttagtacagaacaaaatggagtctcctatgtctacttctttcttatgtaggtatttctataaccagttaaaatgtttatcttggagaccgaggcatgaggaatgcttgacaccaggagttcaaaactagcctgggcaacatagcaaaaccctatctctttcaaaaataataaaaataaaataaaaataaataaaatgtaactacagtatttttttaatgcatgaggataaacctctagaattgaggccctcaagggtccaccaatacttgaattcctgatccgggggctccaccagccatcggcgtgccctgatgactttgccagattcccatggtaaccgctccccttccaccctggtccacattaacctccacggctctaagccacaggcggacgcaatcaccaccctcacttccctaagaagctgggggaaggaagggggcgagcgctcttgcgcacgatgagctcccagctacacccacctactctgggtgagcacccctcccaggagaaagggagaacctaagggcacctgagtcttaggccccaggaccaggcaaaagaacgtttcctaaagcctgtgtccagactcccctcacaagtcctttactacacccttgtcactcaaggtatggtctagtagactagcagcagcagcagcatcaccgggagcctgctagaaatgcagaatttcacctactccagacctactggatcatagtctgcatatgtaacaagatcgcaggagatccatatgcatattaatgtttggcaagtgttggttgctttcacaatccagataagccaatgccataaataaacacatcaaatcagaaacacctgtcgtaggctgactttttaacctagacgctaaaagactgtttttatgatttataagaggaaattcccaaagttgagttccccatgcttagtaagagtgaaaattccctttgtcttctctgaccatcaatccaggacagaatgtctcactgatcttggggtcctgctctcaaagccaatcgggaaatcagaaaggacactttctactcctagaataagagtgttacatcttttaaacaaggtgaaagggagagcacaaagaatggctggatgccttgaacctaccaagataagtaggtcgaatggcaacgtaagggtaaatcccacctccagggaagataaagcaccactgtcttaaacaatgaaaggagcaccccaaatgttgctcacaaaacccagctgagtaactcgcaaaaagcagaccccatttgcatgttaaacctcaaaatgaaattcccataaatactaagacagtggatcagtacccttcagagaagttcccaggattggtaacttccctgtctgatgagttttctccacctccatctatcttgggaaactgcagtccttcaatttaacttcctcatcagatgacagctgcaaaccagaacagacacgtcccaatcctagatgaaccgctttgcttcactgggaaatattaaaaagaacctaatgattcaccaaagagcaccacatttaaagaaaagaaaattatcatttttagtggcaaagacaaaattagatgagagaaaaacctacttcaaacagaaaacaactaaaaacatttttctaaaaatccatggtacatgctacaacatggatgaaccttgaaaatattattttatgtgaaagaagccagttacaaagaaccacatattacatgattccatttacatgaaatgtccagaatatacaagtctgtagagacagaaggtagattagtggttgccaagggctaggaaggatgagacgattgggggttaatggctaaaggatttggggttttatttggaagtaatgaaaatgttctaaaagtgattgtggtgatggatgggcaactctatgtaaatatactaaaaggcattgaactgtatactttatttaaatgggcgaattgtatagcatgtaaattatatttcaataaagctgttttaaaaaaattatatggctccacactagatccatgtttggagtttctaatgtaacacaatgactttctgggcaaaatctgaaaaaaaaaaagttgatgtcagtactgagtagaggccctgccaggtttgtatggcaaaacactcccatctcagtttgggaaataatttcacagtcttgtctaaagatcatcaatctcagctgggcgcagtggtgcatgcctgtaatcccagcacttcggaaggctgaggtaggcaggtcagctgaggtcgggagttcaagaccagcctgaccaacatggagaaaccccatctctactaaaaatacaaaattagccgggcgtggtgatgcatgcctgtaatcccagctactcaggaggctaaggcaggataattgcttgaacccgggagacagaggttgcagagagccgagattgtgctattgcacgccagcacaacaagagtgaaaccccatctcaaaaaaataaaaaagtcattaatcacacagaaatccccagctggctttagctttctgttccagaamcactggaaaaaccaaaacaggccaaacacactttcaaaacaacacctttaatctatgtgggcaaagggagaaaaaggggatcatggaataggagttataggtgctgtcagaacacaaagttaagaatttactatcactatagaaattcaagtccaatgtagattccgcagagaaactatgtatacaaagaccccaaataacttaacacacacagaatcgtggctaaaagagaccaccctgatggctaaggccttctcggttattacactgacctcagctctggaacctctattgagttttagctttggcagattctcttctgtcttcccaatctgtttaatttcccaagccaagggcatcatgagaagccccatgagcaccctgattgcatccacaagggcctgttggcttcagggtcacagctgttactatggaaagacagaagggagaggtagaacaggtatatctcttatcctaaacgaaaacacacaaaaccttagggcattagaaggcttagagagtgaaatctctgcagctattagccaacagcttcctcctgccttgacgacctggattctctctgatccccaggcaaatgaraagaccaaatgttaggcaattaataatatagcagatgctgtttggcttctgtgttctcctatagactcctgcttcacgggcaaaaatggccgtgtctgatgccaaggtccaaggraactggcaaatgcctagaacagtgcctagcacatactaggtcttcaataaatatttgttgaatacctcttgaatgaatgctgatactcccctgtcactctctgccttcttccctcagcctggaaaaacacacacaaaacacacacacacacacacacacacacacacgaagttgaatccacacctgtttattgcaaccccatctgtaactttgcaaaactaataagcacaacagcaattactgctagaatacggatttcagtgggcagggcattttgtcaattttgtaccctaaaagcccaaaacaatgcctagcacatagtaggctctcaatgaatatttgcttaatgccgaatgaattaagagcctactatgtgccgggcgctgtgctagactctgccagcgacccaatcgatcgcttccaccccggcggcagaggccgccccctgagtcctcctaccgccaggggccgctgtaggaaacgcctggcttccttccctcgtcactctttgaccacgtaaagtcactgcccggagctacgatggcagcgtcagtggcagctgcagcccggaggctgcggcgggccattcgaaggtcgcccgcatggcggggcctcagccatcggccgctctcatcggagccccctgcagccaaggcctcggccgtgagggccgcctttctgaacttctttcgggaccgccatggccaccggctggtgccctccgcttccgtgcggccccgcggcgaccccagtttgctttttgtcaatgcgggcatgaaccaggtgagrgccgaaccatactgatagggagcggagttcgtgagttttctggtgagaaagacgctgcaggattgggcaaaagaagcgagaggcggagttcgtagcttttggggaaagagggcggtgcttggttgggtaaagtgatgggggtacggcgctcagagtatagggagggcttggggagggcttgagctgggaacttctggattgggattgagtattaggtccagaaatggctggagtggaatcccgagggagaagtctgatttcatttattcgttatttaaataaagataacgctttcattaaatgtttattgatcacctattgtttgctgagtactattctctaaggttttggtttttatcaaccactcatcttttctagacttcattgtcctcatctgtaaaataggggcggcataagttaaccttagaggccgtctgggctccctactaaatgagtctcagttttgttccctgaagttattgggtgtggttgaagaagctgagacggaggatgccacctttcagcgtcccrtttccagctcccaacacattcctccttcttttaccttgcctattttactaggcagagggtctccggttcatgatttgtttacctcttctctgctccccacacaccagagatggctgtcccgaggctcccagtttgtcctcatagaccaagattacactgcactctcaggggcacagtcagccttcggtctgaacagccatccctatcctcactccccacatttcccttctactgagaaattggatatccctctccccctccccactctatgtgcttccagttcaagccaatctttctgggcaccgtggatccacgaagcgagatggcaggcttccgacgtgtggccaacagccagaaatgtgtgagagctggaggacaccataacgacctggaagatgtgggtcgagacctttcccatcataccttctttgaaatgcttggcaattgggcctttgggggtgaatattttaaggtgagtctctggggatcagtgatcagccaagaagggagtcaatttgtcctgtttccattgtactgtctgcttaggcagggcctcataccagatgtggaggcaaagtgctagttgagccggtgtaacaggaattacctcacctccctgattggattgtaagtccctgaagggcagagactgtactttctgcctaatgatcactcaaaaattgttgtttgaataaatggtcaaacagcaatgctaaggtgcttactggagttaaagatcactctaggctagagtaggcagagaatttcatgtgaaagtgggacttggtctgggacttgaaagaagataggacttagaagaagggggaagctttctgggcaggaaaacactcagaggcagtaatggttcatggcttattctgggaacaagatggcagcagaaatgcttttgtcttaastcgggagctaaactcatgtggcttgattacttcagtggggtctccctctcacccrtcttccycccccaccccatgctggtttctgctgcaggaggaggcttgtaacatggcctgggaactgctgactcaggtctatgggatccctgaggaaaggctctggatctcctactttgatggtgaccccaaggcagggctggacccagacctggagaccagggacatctggctgagcttagggtaagtcagccccctycttatgttcattcctggaggtcaggaggactggaaagtggagactaccagcaccaatcctcagagtcttagcatttcattccaggatattgtggggtcagccctgttcctcctcttgctgagctgtgacttgagggaggggctctcatggcagagagagtcccagcttctgggtctgtctgtctcccaccactcacctgcttttctccccagggtgcctgctagccgtgtgctttcctttggaccacaagagaacttctgggagatgggggatactggcccttgtgggccctgtactgagatccactacgaccttgctggtggggtgggagccccccagctggtagagctttggaacctggtcttcatgcaacacaacaggtaatagggtgctraagcaggatgagaatccctgactagaagtgggaaaggtggcaattagaagactttgatctgtttcatataaaaacaaacatgtaaacggtgcttaccgtgtgtcaggcacaattctcaacacctyatagataataactgatttaattgtagtctttgcctgtgacagcttaaacaagtcactgctattctctgttgaacttgatgatcaacgagttgaacttgatgatctcagattttcttctagccttgacatatctttctaggggcaaagaattctgtcccaagatgggatgtctggtgcccaggcaagggcccaagcaggggtgagaatggaaatagccctatatgaggaaggacaggaccccaaggccatcatcatctgctattgcagggtggcaggggaagatactgattgtctggttcctcccactgtcagctcccttgggcccccccccatttctctactccacttgggcatctgtctcacacctgtaatcctgggtggggcctcaccttgcacaccttccctggccagagaggcagatggaagcctgcagcccctgccccagcggcatgtggacacaggaatgggcctggaaaggctggtggctgtgctgcaaggcaaacactccacctatgacactgacctcttttccccgctgctcaacgccatacagcaggtgagtgcctcttcccttccagaagccctctaacctgctcttcacagccctcagccccattgcattccatctttgttgagaactcagagtgttctcagcatctgaggacaataaccaaccaagaattccaagacgtcaagcaagacactaggattcattacttattacctgatgttcctcctaactccttgcctctttcatttatttagaaaatacgtgttgagtgcttactttatgttaaatcctttgtgtttggtacagaagacacagcagtaagcaggaaagagatcatggagattatatgctagcatgagagatagacaatcaataaatgtgttaaagaacaaggtaatagcttacagattgtgaacaggcagtaaacatgggtgaaagtaactaggaagaaggaggggtacagaggaatcttagataaggtgcttggggaaggctcaccaagaagatgacctttgagctgagccccaaaggaggagtcagctacaggaagttctttccaggcagaggggacagcaggtaccaagggccttggtactgatggattagatggggaggggaaagagaaatcaaagatggctcccaggctattggcttgagcaacacagtgaatggcatgactgtttactgagatgaagaagcttggggaagagagaggtttggagctaggtgaatcaagctccctgctttggagcatttccacatgtgtgtagcttataccctccctccttgccccgcaagaaagggcttgacatgtgccaaaaactaaaaggtggccagccagctaaaggagaatcccatgggatatagtaggaacatgtgtcagttggcttttgctgtataaccaccctaatgctctgtggcttaaccaacaaccatgtatctgccccctgagtctgtgagctagcgtttaggctgggcttagctggctcattctttggtcttgtgtgagctcattcatccatctgtggtgagctgagaggccgcagctcctctggggcttggctggctgtcagtttgggggcagtaggggtgactggaccatgtgtctgtcatcacctagctggctagtctgggcttgtccacatcacagctcagcaaggttccaagacagagagcagacacataggctcagaacagtgttgtttccactgtattctatgggccaaagcaagtcacaaagccagcagagattcaggggatggagaaatggattctgtcccttgatgggaaacagctgtaaagtcccattttaaagtggcatatgcctaggaaagggccatttttgtgaacagtctcacagagaagaaggcagaatccagtcttgtgggcctcaaagtccaaagtggggccttgattctcagagtggtgagaagagttctcagggctgggcacggtggctcactcctgtaatcccagcacttggggaggcagaggggggcggatcgcttgaggtcaggagttggagaccagcctggccaacatggcaaaatcctgtctctactaaaaaaatagaaaaatcagccaggcatggtggcacacacctgtagtcccagccacttgggaggctgaggcaggagaatctcttgaacccaggaggtggaggttgcagtaagctgagatcgtgctactgcactctaacctgggcaacagagtgagagttcatctcaaaaaaaataaataaataaaagtgtacatcagatcatgccacactccccactgagaacccttcttttttttttttgagacagagtcttgcttgctctgttgtccaggctggagtgcagtggcatgatctcggctcactgcaacctctgcctccggggctcaagcaattctcgtgcctcagcctccagagtagctgggattacaggcacccgccaacacacctgactaatttttgtatttttagtacagatggggtttcaccaggattggccaggctggtctcaaactcctgacctcaggtgatccacccgcctcagcctcccaaagtgttgagattacaggtgtgagccaccgcgcccagcctgatgtacacttttaaaaggctactcctgttgctgtgtggaggatgagctggagggagatgagagcagaaacttaggaatcagttgggaggctattatcggtccaggcaaggaccacagggcatgcttcggataatagcagtggaagtagagacaagtagattgatttgagagatgtcatggaggtaggagcaaaaggaaccactgatggatcatgacgggtaggggaaaaagaattcaaagatggctcccaggctattgacttgagcaacacagtgaatggcatgactgttagacgaagaagcttggggaagagagaggtttggtggtaagtgaatcaagctccctgctttggagcatttccgtgtatgtagcttacactctccctccctgcccacccccacaaaagatgggagaggcaagaacaggtagtggagagcacctggagtccaacaggcccggctgagatctcagatctgctccttgagagctgggtagccttgtgtcactgagttcctctgagcctcagcttcttcttctttaaagcaagcatgctaatacctcctggaatgggctgttttggggattcgaggccatgttgttcaagtactcacccagttctgatagtagaaattcagtaaatggtcacagatatgttcacttgtascaccaaatatgagccccgtgagggcagggcctggcttgtgctcatctgtgaggcttctcagcccaggactggactggcaaggccattctggatgtggttggctttagggctgagggcagatgctctagaggmgataaagagcacccacctgggccaggtcaggcagggccactggctgactcttctgcttcccagggctgcagggcacccccttacttgggccgagtaggggtggcagacgaggggcgcacagacacagcgtaccgcgtggtggctgaccacatccgcacactcagtgtctgcatctctgatggcrtcttccctgggatgtcaggtcccccgtgagtctggaagggctacagagaggacaggggctgctgggggtctcaggtggaggagggagggaacaggagaggtgggtctggttgagccagtaggaggaatggggagagggagagctttgaggtgggagcacacactggacctcgtccttcccactccccatattgctgaccatgagccgctggggrttcatgtctgggctctgaacccctttaggctggttcttcgtcggatcctgcgtcgagctgtgcgtttctccatggagatcttaaaggcaccacctggcttcctaggcagcctggtacctgtagtggtggagacactggtaaggacagagcttctttttcactctgggcctccctgggcactttggggagcctaccactgagcctagacagtgcccccagcctgggtgcccagaggtccccaccctaaatatcgagcccagcatcctatcagcaagctaagaaagctgtccttgcttacaagaagcaggagaacttgaggaggctccttttccaaactgctcagccnttgacctcaggacccccttctgccaccctacagggaaaccagttccccatttgagtccctctcccagcccctcaatgtgtctgagcctccagggcaggtgtcctcagggaggcccagggtggggaggtgggggtgggttggttgcctttcacacctcctcagccctctccacctcccccagggagatgcttatccagaactgcaaaggaactcagcccaggtactggattccagtgggagagaaaggggttgatgggagagttgtggagagagaccctccttccaaggagacccagctccacttcttctctgcctggttcagatcgccaacctggtgtcagaggacgaggcagccttcctggcctccctggagcggggtaggcggatcattgatcggactctgaggaccctggggccttcagatatgttccctggtaagcagkatacctagcccatgcacaaggggctcgctgagactcaccaaggtgggcagaggagggagctctgggccagccccatgcctcatatccacccctgacctcttcccaatgttcctttctccctggactctccttccatacccagacccctctgcagcaggaataccaccctgcctctccccatgtccacagtgcccagctagccctgcctcctgctttcctaggttggcttcgtgcatagactgagcttccctcctcccttgaaatgatgtgtgcccagggagtaccctggactacccccagctctggccttgaggcatgaagcctgaatgtgacccctctcctgaggctacccagtatggagcgggtatttgtgtttggcatctggtggcttctgcgtggttagaagggccctggaccttatttttctccccttctttgtctaatccctcccctcctcaacaktctttgtctttctttctcaaagctgaagtggcctggtccttgtcactgtgtggagacctgggactccccttggacatggtagagctgatgctggaggagaaaggggtccagctagactccgctggactggagcrgttggcccaagaggaggcccaggtacaagctgtggcaccccatgctgggttctgttaggacacctcttccccagccctgagctcctgggggaggagctgtgaatattgagaggaatcaagaggctgagataggatctgtcccctcacctgggaggtttctaaaacctcaggccacaaccagtagaaagcaaaactagccaatgggctaaacacaggagcagaagccagcacagcttcctggagaggggccctccaggggcagcagtgggcaggaaggcctaatcccgaggagccgacatgatggatggttcaaccagctcaggggctctagcagccagccaagccctgagttcttattccagaagggctgcagagtccacagctgtgtggcagggacagggccctgcgaggctgaagtcccactttcattctttcattctccatgcacttcttccatgcccatgcccaccctgcagcaccgggcacggcaggmtgagccagttcagaagcagggattgtggcttgatgtccatgcgcttggggagctgcagcgccaaggagtgcccccaactgacgacagccccaagtacaactactccctgcgacccagcggaagttatggtgagagcctggaccaaggcctgccgccacaagcttgcctgaccatgactaagaagaatgtccaagatggttgctgctagcccctatgtattccccaggatggccaccaggggtctctgtggcccccagctggaagtgcccctgccagcgggggtgcttgttggcctccaggcacagacccaccttcacgtccccagcccctgcccaccactaataaccattctgtgccctggcagagttcggcacctgtgaggcccaggtgttgcaactgtatacagaggacgggacagcagtggcctccgtggggaaaggccagcgctgtggcctcctcttggacaggaccaacttctacgcagaacaggggggccaggcttcagaccgtggctacctggtgcgggcagggcaagaggtgagtctccatcacaacccaggctgatttctgtgggcrgcagacccaarcctgagtkggagccaaggggagggaaaggctacaggcaccttgaccactaccctccctcaggacgtgctgttcccagtagcccgggcccaggtctgtggaggtttcatcctgcatgaggcagtagcccctgagtgcctgcggttaggggaccaggtgcagctgcatgtggatgaggtaaggatcctccctaactgttcccaataccctgcagccccttcactctcccaaccycctgccctcacccaggacgctgggtgacaaaagtatttcaggcctggcgtctaggctgcatggcgaagcatacggccacccacctgctgaactgggcactgaggcagaccctgggccctggcacagagcagcagggctcccatctcaatcctgagcagctgcgcttggatgtgaccacccaggtgagccyggcatagaaagacaggcttcatgtgaggtgacaggcataaaagagagacagcctgctgtgagcgggttgcccttagagtcctgggctctaggcccagcacggccacccaatcactatgggaccctgggcaagtcctttccccttgggctccttgtgcagcagtgaggagtcaggctacagagtgtctggggcctcgcccagctctgatgtgggatcctgaaggccctccagcaggggccttcccttcayctccagccgctccccttccttgtttctactgtcatccaagccattcttgcctaaactgggctgccctctccctctgctgccaccctgtctccctgcgcttcttacacatctggcttaaatcctttctccaggaagtacttgctggctaatccccatcccacctgcttattccctgcccctgcatccccccatcctgtagttctctcttccattgggctaccccttgtaagctccatgtggatacagcctcctttttctgtttctttaacttttggtgcctggtgaaaggcctggagcttccaataggcccaactcccagatagctttctaaggaaaataattgtctgctcaggtagtgtttattgagcacctattatgtgctagccactattctagaacctggggatagctcagtgaacattgaccgtgtttcaatgcatcagttagaggtgtggggctgactgcatgttggtctttccatttcctccccacccctccagaccccattgaccccagagcagctccgggcagtggagaacactgtgcaggaggccgtggggcaggatgaggctgtgtacatggaggaggtgcccctggcgctcactgcccaggtccctggcctgcgctctctggatgaggtgagttggggaagcccttttgctggagatcgggggcctccttcaggcatacctggaggctttatcyttctcctttggcagttaacrggcctgtcccctcttgacctcaggtttacccagaccctgtgcgggtggtatcagtgggggtgcccrtggcccatgcattggacccagcctcccaagccgcactgcagacctctgtggagctatgctgtgggacgtgagtcactcctttgtgctgcctggcccaggggncccrgatccttgcccttcccttggtctttggagccatcagcccttaatgggagatgcacgctggcttctsccttctctactgtcatgccccgactttctgttcactccttcctcccacaggcacctgttacgtactggggctgtaggggacctggttatcatcggggaccgccagctttccaagggcactacccgcctgctggccgtcactggggagcaggcccagcaggtcagcatgccagtaggcctgggacttctgggttgagtgggtgcatgggacacacgcaggtgacatgctcaggctcaggggtgcccagcagcagagccagtgttcatactyggacaccaatgtggccatatcagctattggcagctggcatgtgttttgattatttggtgctgstgccttgattggtcctgattgttaaatyttayttgtccctgaccagtaatgagttgagaggccttgtcctggggagatgaatgtaatcctgaccctcctgtcccctccctgcaggcccgagagctaggccagagcctggcccaggaagtgaaagcggccactgagcggctgagtcwggggagccgggatgtggcggaggcactgaggctgtccaaggacataggacgactcattgaagtgagggccacgcctaccaccccaccctctcctagccctattacctcccctattcctccctggactccttcagactctccctagcactccaattgggttgggctccagctggcccagatatktgtctgcagggtgggtgtcttccctggccctgctggtccctacctcagagactatggctcagggaagggcaggggtgatgtactgcttctggccataggctgtggaaactgctgtgatgccccagtggcagcggcgggagctgctggccacagtgaagrtgctgcagcggcgtgccaacactgccatccgtaagctgcaaatgggacaggtgagaggaggtttggctgcacccatgtgcccagagacactccagcagatacactgagaagtctcaagggctggggcatgggggtgagtcagaggctgtgcaaggacggggtggtgscagcttccttctcctgccagctgagaaccatcacccaggycattcccccacttctgtctctttcaaactgtgtttctcccccaactcccaagtctggctcagaacccccrgaagcctactgacttgattagtgccattcagccctgattgcacctccactgtggatccccctttctcccgcccactcctggtccatctgtgctctgaccttcctcctttcaccttcagcgacctatttgtaggggcctgaagctatgatgaaagggaagtggtgagggaagtgaggaaggacacatgtgggacccaaaaaggaggccaccctaggcagagtccctgccacctctgcctagagctaatgacttttggggtgggtgggggaagcaggggattgctcagctggggcttagttcagaagttggggctaattggaaacctgcctctcagcctgacccctctgcttgtccttcctgccccataggctgcaaaraaaactcaggagctgctggagcggcactcgaaggggcctctgattgtggacacagtctctgctgagtctctctcagtgagtgctagccaagccgggctgccycagggtctggggagggcaaagtcctgaccaggagacagctaggggtctgggaagcgatgggctcaccntctgtctttcgtggtccaggtgctggtgaaggtggtacggcagctrtgtgagcaggcccccagcacgtctgtgctcctactcagcccccagcccatggggaaggtgctgtgtgcctgtcaggtggcccaggtgagggaagtgggagagcagcccaccgcccccattaatacccatcctggtccagctctctgattttacacctttaattcctcccagacaaaggggccaaggctgggtggaagtatctatgaggatactccaggacagggatggggaatctccttgttcctgaaaacagcccctccccaccccagaaggcaccaagagattccttaattcctaacccctcccaggcctcacatcccttgtaaacaagtagcagatgttcacgttcatacacctccccacacacatttccagcccaaaccttctccggctcatcacctgactgccccaccatgtgcccagctgggaagggggcactgatgaccttcagctccactcttgagggtaccttgagtggatgctggcagggagggccactctgcatcgcttcctcttctgattctgttcctagggtgccatgcccaccttcacagcagaggcctgggcactggcagtgtgcagccacatggggggcaaggcgtggggctcrcgagtggtggcccaaggcaccggaagcactactgacctggaagctgccctcagtatagcccaaacctatgccctcagccagctctgacccaggtccgcccagggacccacatggactaaaggcaatgccaggagccctgaaggagccagcagaaccttcccacatgctgaagcgaggactagaggctggaggccaagcagctgagccaaagaagatcacctgggccagggcctacrtgacacaaggagacatgggctagggaaggcagaactgggcccaaagacacacacccccttggtgaaagagaagacatggacaattatggctgtgactgcacattagaaattatttcactggccgggtgtggtggttcacacctgtaatccaagcactttgggaggccgaggcaggtagatcatgaggtcagragatcaaaaccatcctggctaacayggtgaaaccccatctctactaaaaatacaaaaaattagccgggtgtggtggcacacrcctgtagtcccagctactcgggaggctgaggcagaagaatcgcttgaacctgggaggtggaggttgcagtgggccaagatcgcaccactgcactccagcctgggtgacagagcgagactctgtctcaaataaataaattatttcacagaggatagcaagctccagaaggttctattacctttaaaaaagagtagttttgcccctcccagcaacctggtatgggtgccctaagaccagtctgaactcacactgtctgaaaggccacccaggatccaaatcgggccatcttcattgccatgagtgttcggacaggctctgcgtgccaggcaacagtgggcagacaaagggctccctggctactgggaagatacagaaccatcctgtgaaaatcatttcagcactggagaccttctttgctattacttctttcattaacaatgacctctaatttaaattgggccctgctggtttgttgatgaattgagcaactgagaacgtggcgggcactaaactgacagttccttccttcatggagcctgcttcatgtggaggaaacaggaaataaagcaaaagaagagggtcaggcttggtggctcatgcctataatcctggcattttaggaggctgaggttggagaatcgcttgaggccagaagtgcaagaccagcctgcgcaaacagcaagaccctgtctacaaaaaaaaaaaaaagtaatctttatgcctcagcctcccaggtagctgagactacccacaccttggtcccagctacttgggaggctgaggtgggaaaatcactttgcccaggaattcaaggccgcagtgagctatgattgcaccactgcactccaggcaacagagtgagaccctgtcttaaaaaaaagaagggagaaagtgtcagatggtgatgaggtctgggggggaaatagagaatggggatcaggagtgtggatggtgrtattccctcaccaagaggtgacatgtgagcagggagctgggaggtgagggtgtgacccgtgtggaaatcagggaaaagcattccagcctgagggaacagccaatgcagaggccgtgaggtggccagtgccactgagcagtgagctgggataggggcaggtgaggaggctggagagcggggtcagacaaacaatatgcttattaaaacaagttgtacrgcacctgcctcaagcctgagctgaagctgaaaattggcacttcaaagcaggaggaagcaaagagatggaggaaagccctccttccctaccagaatgagtccacctcagacagccagactttggacctctgcctttgttcctagatctctgttgctagatgaaggaaagggcctcaggggatccatcttcaaatcaagggctccctggctaccaaattctgtctagtaaaaattattcgagcagcgtgggcccgcctggcatcattttctgcagtttctcattctaattaaggcactgatgatttgctggtaaggcactgctgagggcttgaagggacccaatcccgggtgcctggcccctcactgcttgcaaagcagcatcctggccactggggcagtagcctgtttagcagtgctcaccacaggcccaggttcaagctcctcygcgagcgccaagatgagttttggcacccctgatttattgatgagttaacagagcttcgagatgttcatccagggtaaccaactagtagtcctcggcagagctgaagtcaaagctaccctttgaaagccccgccaccctggctgcctctcccttcctgaaggccaatttcttttttttactagccgtccctctggtctgtccctctcgccctccaggagatctggggccccaaccacatcttgtcgcgccagggctggaagagagtttggcacagggcatggactgtgtgaaggagcgctgtgttggcctggaaccttcctgcgtctggtaccagaccttcagctgggggaaaggtggaaggtgccctccctcccgcagggcctaaggtcaacaggaggcctcacgggagttccagtgacttctacaggtgccttggagaaggtgcgtccaccctcctcttcttccacagacgcttttcctggaccagctccctatccattgccacacaaaagctaccaagagagcacaagcactccagaccagcagccctgcccgacccccgcctcccgcagaaagcccacccgttcctagacacgtcccacggaagcacagggcatagcgcaaggccacagtcccactacccgcaaagcggccgcttccacggaaccgtcccgaggccgggcctggccaccctgcgcgcgagtaagccgcgtgcctggcgcgcagcggcagcggcagcggaggaagcagcggcgcgctcgtcctccccgcccggcccgctcctagcaacgcggggcgtccccaacgacaaagacctgcgccggcgcgcgggactctgcgtgaggcgagcgccggggctcccggagcgggtgaggcgacctccgggagtggggacacccagccccggtctcccttatcggggccccctctggccggctgggcccgggagcccctctagcgtcctctgcccacaccggcccgaagcccacgggcggccattgcctgggttgcgttttccgtggcggggaagcgccggtccgtacccacgggagaccccacgccctccacgcgaggacgccccgcgcctcctccccaccacagtcactgtctgcaaaccgtctggcccggggctggggatccgagtgaggcgaggggagggactgggaagaagagggggaaagtggggcatccgtagggcgtggaggagagcggtcccaagccctggggccctaggcttctccgaaaggccgtccgttcccatcacccgagggctgtaatccctcccgcgggtgcggaagcttcctcatctccctacctcccactgcactgccggtttccctgggttaccaaggagaagccagcgcctctacaccccaggtaggatgggggagggactcctggcctttggagctgagcttctctgctggggtgtctgagctgaaggtagggaggaggggtgggagactccagagccgctggagtcacttttgagacaacagacctgagtggtcaggagttgggaggaggccagcccaggggctgtggtaagtgaactggcggtttcacccagcccaagtccaagcacacgggccgaggctcagttggagaaagttttttgcccttccacaagtggaattcccaacttgggagtgacttaccccaaagtaagacatggtgggcatgaaggatatggaggtggctgtagacaaaagcccagagccctgagaacagaggagggctctcctgaggggatctggggtgggagcggctgagaaggcagagaaggcagtcagagcagtgggtgcaaagccagctcctggggaagtgtcccgggcacagaggcgctgtctgcccaaagagggccgggtgtctccacttctccactaagaggaagggaggaggggacagttgaggaccagaactgtgatgcacaagaaggtgagaatgcaaacctacagcatcttcctcgtgttcccattagggcaggtggaaggagctcctacccagaatggttagatttagctggggacctgaggaaggatggagaagacctgagacttcctgtggagggaatatgccaggggcaggagagcaccactctgcagcactctgttgggctccttgcaccctccaaaggatgcaggcagtggtccagccttgcggaagtctcctatacccagcagtgaactggaagagggagcctggactatttaggtcagcaccaagggtataaccctgggctccatattggtgaacaagagagctcatgagctggagaaagtgggagacccactggaaaagtgctatgaatgactgagttgggagcaatttataagcaaccccagcatctcatggaagtaagagcattagacagacacaaactaaaacctcagcttctccacttactagctagtgacatttagtaagttacttaagctttctaagtttcagtttcctcatttgtgaaatggggacaatagtgttaaataataatcctcaataattaatttgagattttaataaaattatgtagtaaggtatctagcatcttcactacaatatctaacacacatcttgagtgctggctctgggcccagcactatatgaaatgtctcacacacattagctccttaatcttctgagtaatcctatgaaatagatactattaagtactgtccccacgttatagatgaagaaactgaggcaagtggggacctgcccaaggttgcacagatagtggggggcaccgtggagatttgacttgaggcagcagcacaactcctgagtacttagccagctgctgtcctgcctcctgctatgtacatgttattgaaggcctagagctctcaataaatcatagctatatatagccaagggtatggttcccagaacacctgtccaccagattcaagccatcagaaatgaggacaaccctggccaaactggaacatcttgtcactttctattacctgtgcttgggcatggaaagagcagtccacacccaatcctttgagttaatgtcctggtatagacgttgttccctgtgtgtgatttcaggaccctggaccctggtcctgaggatgcagagtaggggcccaggggaggaggattggcctttccctggggactgtggtcccaggttagagacacaaccatgtgaagccaaacaagctggtgaggcaggccccagagaagtgaaagtccactgcacgtgtccccactctcccactttccccctctgagagcgcagcacatccttggatggagacaccaggtggtggcacaagacgtacccactcctggtggccctgacctctctggaatgtcaggattcctgccctgcccatgttcaagactggagtcttgaacatgctcctagtcttcaaactctggcattctctgactggcccaacaggttcccagggaaagaaagctccggagaggaaggtgacccttcagccacctccaggactgccctctgtgggtccttggggactgtccatgtgcccggggcccccagctattgggtatccacccatccctgcaggctcccagggaagatagtgccacctacttgcaccctcagctgcaggctgatgactgccaggccagactaagaccaacctgtgaaacaggcagagctctctcagactcctgtcttctcctttacccactccccacctcctctcctttctgtggttattctccttgcctcctttctttttctttctttcttttttttttttttttttttttgagacagagttgtgctctcattgcccaggctggagtgtagtggcgcaatctcagctcactgcaacctctgcctcctgggttcaaccttcatttttttcccctaattatcttataaaccacctctttcagcctctcaagtagctgggattacaggcatgtgccaccatgcctggctaatttttgtatttttagtagagacggggtttcaccatgttgatcaggctggtcttgaactcttgacctcaggtaatccaccctcctcgacctcccaaagtgctaagactacaggcatgagccaccatatcccgcctcccttgccccttttctaactttgctttttgtatctgaaactcattcacactaaggtgtggaatacatatatcctgatatcttatatgtagtcatgtgtattatatatgtaatttctgcacacttaaactgtcagaaacaatatattacaacttctactttttaaaaagtttgctacattaggctgggtgcagtggctcacgcctgtaatctcagcgctttgggaggccaaggcgggcagatcacctgaggtcgagagttcaagaccagcctgaccaatatggagaaaccccgtctctactaaaaatacaaaattagccagccgtggtggtgcatgcctgtaatcccagctattcgggaggctgagacaggagaatcacttgaacccaggatgcagaggttgcggtgagctgagattgcgccatggcactccagcctgggcaacaagagcgaaactctgtctcaaaaaaaaaaaaagtttgctacattagtgtcagtatacattttatgatttactatgcttttgtttgacctaaaatgatgagatatgtttttaaaaagcagttcaaggttaacatatggatataggcatacaagtattgatattaaattttgtttcatttagggggaaaatgcatttaccctaacagggatgaagactgtacattagggccgtgaaattcccctagtggagtgccaaaggcctgggagcgcacttagcccggggaggccctccccacttcccaaggagcaagaatatgctttcttcttgcctagtggagggcaggaacagtgaggggagggggacatactgagtgactgtggaggggtagtgtattgtggctagaggtaggagacctgccctcagacgctggccccagctctcataggtgttttagggccagtcatttcctgtttccttgtttcttcatctgtaaaatggggataagaaagcccatcctagctccattatagggtggttgaagagtcacatgagaagattttttttatt

SEQ ID NO: 94222 - DNA, 22389 bp, Homo sapiens
  misc_feature (1)...(22389): n = A,T,C or G
ataactgaatcaggaactgccgagcagaaggggtttcctggttggccaggccagggtcccttgttccccttcggtagcagggcaggccccatggagaaggaatagtaagagggaggagcacatgggcaggccgggcgcagccacccagaggcatgagcgtcccatttgtgtggggtgagcacagaggtcaggagggcagtgcaggaacaacttccctcttaggccaagaaatctgaaactgggaaggcagtggggagccttagtgtgttttttagctgaagtagagtcacgctttagggagattggatttgattggaatatctaagataggttggagctgggagagaccctgggatgccattgttgactaatattctgttcttgtccatggtgtcttgtgtttctgagggtgcactagatgtgggtaagacagttaaggagcagaggggatactgttttgcctcaggaagggcttgcccctctcctgtcagcagctgggttgatgtgctggtctcgaggagctgggctggcctgctcaccgcttgtgtagcgtagctttgcctctgggttagctgtggggtggtggaatcctgcccttcctgcagcccagacccaggcaggaggacctggagggcccgctgtgccttggggctcttccggatttgtctgacaccaggctcctaggactaatgaggcctccaccagacttggtcttgactaacctcaggggagctcatacctctctagaacaaacttactgtcctcagcttttcggcagccataaataaaagtcatttgtgttcgtttatttaatgctttccttttacagtgaagtgaaggtctttgatgacctccttcctacctgctaaccaaatatggaaatctgttctggacagagtccatggccgtgccaggaagcaggcsttagccaggggcctgcctggagatcagccctcctgagacaatttctgtgggggtggaagtgggggagggagaaagtcgctcagaactgatggtcctggacyggccacggtccccagagcctcagcctcccaggcccaggctttgttgaagatgtccgggccctggactggcgctgtctgggcccccactgacctgacccagctgtttctctctccctgatggtccttgttttctcggtttgtagttcctgggtaggatggccagataaaatacaggatgcccagttgggctcggattacagataaacgaatgtgtaagtatgtcccatgcagtattcgggacacatactgaaaaccggtttgttgctcttctgggattcaaatgtaacggggtgtcctgtttgtttcacaggtatcaggactcagctagggggtccttgatgtttatttgccccattgctgggctgttctcaggaggatgttgagaccctggcgtggagcgcctcctcggcgtgtccagcagagggcggccgtgcctcccggaggcatcgcggggcccagagcgcagcccagccccgtcccctggtcctgtggctcgaggtcggggagggaggggcggtggtcgctgcggggcaaatgtttccactcacccggagccacgacccacggcctgtgcagggagagtcgaaagcgcggcccccggtgagcacttgggaggtgaaccggttccccgccctggtgggctgtcaccagtcacatcaagagatgcaggacggcggtggcctcaccagaggcattacgagttctctggagcccctccgccaccaccgtccttgttcttccttgagtcggaaccaggtccttggggtctgtgggtgctcagtggctttgcagacctgcaaagatttgaggtcttccaggtgcctctccttgccttcaccagatgctggtttcgggggcagggatagggctgccaggcatcaggaaggtttgtgaacggggatttaatcgagtgtttcgcggggtggcccctgccatctctgcccctcgttttgtacgagaagcaggcggaaaccagctctccctttgagaacgcactgccctccgctgttgcttgtgtgtcttgccttgctgtgacccagggagagctccctgcagctgtcagctccctggtgacctcaggctctgggcatcccagtaagcacggcttgcgcacccactgtgtgccagctcccactttcctggagctcgtgggaggagacggggacagtgaacgaacgcacagactgagatggtgggaggggctgtgcgttccgggytgtctgcacgaggggctctggcaggggggccgcgtcccggcttgtctgcgcgaggggctctggcgaccgcgtccagcactactgctgtgtgtttttctttgctgtgacccagtgaagacctcctcacagacagagcacagcagactcgcggtgctgaaacccggagggttaccctgtccctgactgactgtaaggttacactaaattaagaggcactccaaggattgcaaagtccgaggggaattttgaattcgtgggtcctggattgtgaatttgaaggcagcggtttccaacccttttaaatcttgaccccgggaagaagtaccttctacatcttgacccagcaaacacgtgatacctacccacactgtattttgttcaattaaccctcaaatgatgtttcctaatgtttggccctgggtcaagcatttcacaaactatttaatcttctctacaatcccaggtggtagctactgtcttgccgcctttatgcagacagagactgagggataccttagatgtctttccaaaccatccaccccctcagccttccctgcccactgcctgcacgtcaaacccactgacgggcacccgttcgactccaagagccccatgccaggaacctgggagacaactcccgttttgactctgggcaaggtacttcacctctcaagtcccagagaagcagagaaagcaagggcaggtatagtggctggctgcacttaggtggcacctactgtgtgccaggcccccttctgcccacttcacaggtgtcttagtctccatagagtccatttggaaacaggcccggagccatccaggttgcgatgaggcaccaaggtggcagagccagtactgggcaagaggcgggagctgcagttgctgaacccgtgagcttgcttgcctgggagtggcgacctggccctcaggggttgcttgtctctaggggacccagcctgggtacatgtaccaccacccgcttccagctctgctatttgcaggtgaaggagaaagccactgaggcctggcctccaggccaggctctgtccctgctgggagctgccctggcctcaggttcttcctggaagggaggaccaggcagctgggggcagcagcagatccagctatgaaagccgtgacaagaagttccttgaagtgtggtgggctgcagtcagcatatgtaggagacgaccccaatcctgaccctaatcctaattcttgctttccccaccagattttaatccttatcctgcccagggattttaagggctaacccaaatcctgacccaaggggaaggatggaagggggaacagcctgcagcctcacctccaccctctatcctcccaggtctacctccacccctctcctgggtctctccctcttggcttggccccatcccacagcccccactgtcttccccccgctcccactttggcaggcccctccaagtgacctctcccttgctccccagcacacagtaggtgctcaatgaagaacaccgcctttccttgactccagtagatgttgcaccctctccatcttaggagaaaatgtgcgttggctgtcaagactacactgacagcastggtcactcatttgcagacagggtgaagtgtgggggaaggcgcagtagtgacgctgaaccctacatttatgtagcattgatgctaggcaccagaaccctcacaatcctaattccgacgggagctagagcccccccaccccaccgtgagtgcagcaagggagcacctcaaccctgcccttggagggccacaggtcagcttgcaccgtcttcccacccagcaccactctgggtgcctttgctgtctcccaagagccccttgcccttggagttccctcatgatgcccccctgccccacgtgcaggtgtctgaccatccgggaagcagggtcgaggagctcccagttgaagtccagttgccgagacgcaccctgttttggtgttgctggggcagggggctgatggtggtgctgaacgggttttagaggagggtcagggtggcagcggatctggggcccagcagccttgtttctgaccccaggcctgccacttcccatttaagtgaccgtgagtggcagaggtcaaggctggactccggaaacgtgggtctgacactcctgaggcctcccggatggtcccagccgaaaggacccagtgtgggtcccttgggcctgggtttccctggctcaggtgccctcaatccccaggcaccctcagctcagggctccccacgacctggtgggggcacagaccccggcgccatttcatggggttcccagctcctggcgcccccgtgctcttctgtgaaatgggacagcaagtgcgctgataggaacggtgcctgggcacagggctgcgcctggacaccctacgccgtcgcaaggtgggtgccgaggaactcgagcttctaacgtgccagggatccaaggacgcgccaggattttgagtattaggagaaaagaaactcctgaaatgaagccacgtcgccccttccactttaaggtgcctcctgctgtcggagtttccaggcgcacacggcgcggctgccactccctgaggaggaaagtcgggaaccgtcccgcggggccggtcccgccgctgctcgtcctccttctccacgtccccgcccggggctccgccggcccgacccgcggggaacctccagcctctgaggacctcacgccgctcggagacccgcacagcccgggtcagggccgggactccgggcggacgaggtccccgtggcgcccgcacgctcgccccacccgctcttttgggcgccgcggccaggcgggggcagagtccgcgcggtcccgggtccgccgcgccccgccccccccgctgctcccctgcccgccgctgccgtcccccctccctcctcccctcnnnnnnnnnnnnnnnnnnnnacttgtgcagcgcgcacgggctcgcgtcgcccgcctgcttccgacgctgcctcgccccacggtcacggcaggtcgctctgcctgcccctactcgtccgtcgatgagctgtggtctttcgcttgtggctctgccgtcactgtcttcctccctcgtgcgtgctctcccgcctcccgtcatcgttcccaggctgcctgcgcctgttgccggtgtccgtgttcaccgttgccgcgtctgcctgtacgtgctcacttgccccccgtcgcgcctggcgtggcgctgtggcgctgggccggcgtgccgcacaccaggccggagttcttctgcctttgctctcctgcgaccggcggcgtcctcttccaacacgacgtccacttgcttctctcgtggctcgctcgcgaccctgtgcggagttgcgcccggcagccgctcgtcttggctttctctcgcctcgggggcgtggtccgccggctcgcttccgccggcgagcggtgggagcgctcggcacagcgtgcgtggtgtgtgtctgttctgctgctggtcttgtcgtgtgggggctgcgtgtggacccgttcgtcgtggcctgtggttcgtaccgttgccgttccggcgcgctgtgggtcggtcgatcgttcctgccgtttccgtgttcctgtacgctggttgttgtgcggcggctctcgtgttttgtggtggttggtggggttgggtgttttgttgggtttgttggttgtggtgcgtgtctggctctgtcccgtcgcgcctcgttcaccgcgctcgctctgtgccgctcctcgcgcccgctcccgtcgctccccttcccgcccctcccctcctctccgcgcggggcgggctccgcgccacgtgactccgcggccgggccgggacgcgacgggacgcgctgggaccggcgtcgggggtcgcggggaccatgcagcggaggtgggtcttcgtgctgctcgacgtgctgtgcttactggtcggtaagagccttggggacccgggtgttggggggaccctcccgggacggacacgcccccggctgcgcgcaagtttgcaggggaacgcggaggctgcgcgccctcgtccctccgaggaccctggaggcggggacctcgcgtgaggaccagacctccctccgcgccccgcactgcgcgcgccctcccaggctcgggggtccccgcgtcccaggcccagggggatgggggtcgcgagaggcccggggagccggggccagcatcccccgccccggcagcaggaagtctgtgcggaggggccgcgcgcgcgcctccatcccgccccgcctggcctgggaggtgagtcacgcgggcccgggaggtgggggcggccgcgggttaccccggcaggacgtccgcgcctccgcccctggggtgggcgctcccgctgcgcgcggagagggctgaccctcggtcctggcacccggtgcgtcggcgggattcgaacccgtgcacgtgcggggaggcccagccgccctgctggctcgggcgggggagacactggggatgaaggctgggtcccaggcttcgggtgaacggggtggcggggggccgggaggccaggagaaccaaacctgtccggcgggtttgcgggccacactggcggaaggggcatcccgaggcccccctcccgcagggtcccgggaacaaaggccgagtgtttgctctgtggctgcacagacaatggccctggaattctatctctggggggtgccctcctccccaacgtgtttcctgcttctctgccatctcacagcagaggccaagtcctcttacctcccgaaggagacccttttttagggtgggccaggtgacagcaagaagtccctgtgggtgtctgccagcccgtggtaccatttcctgagcacctatggtgttatttatgtaaacatttaggtggcactttctgtatgccaggaactaagcaacatgcaaataacaaacatttcccttacaacagcctgtgagggaggtgctgagtcacctgccggaggtcacacagcagcgggaggtacagccgagatggggttggctgttgctgctgtgtgccaggggtggtggccaggccgagtgcacctctatgctggaagcttgagcacaccacagttcagtcaacactgaggttccagatgctggcatgagggcagtgtgagggcgggagggctcccgggggctaaatgaagagaaggtgtctgttttggggaccccagggagagctttccaggccgagggaagcccggcgcctgtcgttatgggggtgcctgcgtctctagttggagttgctggggcagggaggtcggaaacggaggctaacctgtgtgagcctccgcccgataagagctgtggtcgggctgcactcccttctgggcatcttgtaaccctgactttccacccggccggcaactgcaggagcctcctccaaggcctctcccttcacagcagctccagcccctcctgtgtgggagcagaaggcaggttcttacatcccgccctctccgccgtcctgccctgcctccaggccctggcgctgccctttttttttctttcttgagacagagtctcgccctgtcgccaggctggtgtgcagtggtgcaatctcggctcactgcaacctctgcctcctgagttcaaacgattctcctgcctcagcctcccgaggagctgggacaccgccacacccagataatttttgtatttttagtagagttggggtttcaccgtgttagccaggatggtctcgatctcctgacctcgtgatctgcccgcctcggcctcccaaagtgctgagccaccacgccgggcctgcccattctgttctgcattccctcacctttcttgctcggtgaggcagacctctgttttcttcaccagattatttccccagacttagccagcatggaaggtgtacggtgtcctagggcccttggagttagcatgtcgggaggagtgtggggctccctgcccctccgctgacattcagaacttagaaaagccacacccttttgtgcttgccctgctgggccaaaggatgccctgccttggtttgtctctgggctagccgacccgggcttttgttgtgcgcctgccctctgccccgttctccgtagatgactcctgcttccctggccaccctcagctcagcagggccccaggagccccagtgccatggcagcaccttccataagtggctcctgaatgtgtctytgatccctgaggccagggctgggtctgtcctggtcaccacgtggctggtcgatgaaggggcaagtgcgtgagcgaaggtgtctcagctgtgcccttccttggcttcttcctgacttctctggcctgctcttaggttaaaagaagtcctgccttattttaaccgatgtttattaaacatctgccctggccaggccctgagcaggctccagggactctgccctgaatacggtaggcccctcctggtgccggtgggtggatggggggaaatcaattccagtgtcccacacgtgactgccaaattccacatggggtttgcataaggaagagggaaaaagagcagacctttccttctgtgagagggatgctggcatggacagtcagcaggggagatgagagtggaggttactcagagctactttggggccccgcacataaattagagatactttggggcctggcacgttggctcacacctgtaatctcagcactttgggaggctgatgctggaggatcgctccagcccaggagtttgtgaccagcctggtcaacatgagacccctgtctctacttttaaaaatttaaaaaaaaaagatattttgggcagagagaagtggctgtgcaaaggtgggtgtttgctgagttagttcaaggagcagaaaggaggctgccagggtgtgagrggcagagcgcctgaggagtttgtgtttgtctgaggggatgcgaaagrgagtgttatttgggctgtgaaaaaagctcttccttgctgtctggtgagagtagaggtgggaggcctccaggccraggcaggtgtgtggggccccaaggcccagctggtgagagaacctcacagctcccaggcttttcttccccaccagcctccctgcccttcgctatcctgacgctggtgaacgccccgtacaagcgaggattttactgcggggatgactccatccggtacccctaccgtccagataccatcacccacgggctcatggctggggtcaccatcacggccaccgtcatccttgtaaggcaggaggggctcagagggactgggtagggggatggggtggggccagctttaccctgggggcctgatgggggggtggcacagccctgccctggaggtctgtgtggggccgggggacacagccttgccctgagtggtacctgtgggtaatagggcccccttcagagtccccagctctccagcagccttggggaggccygtgcggaggagtgagggcccctgggccgaccragacccccactggttcctgcggctgctcttgcaggtctcggccggggaagcctacctggtgtacacagaccggctctattctygctcggacttcaacaactacgtggctgctgtatacaaggtgctggggaccttcctgtttggggctgccgtgagccagtctctgacagacctggccaagtacatgattgggcgtctgaggcccaacttcctagccgtctgcgaccccgactggagccgggtcaactgctcggtctatgtgcagctggagaaggtgtgcaggggaaaccctgctgatgtcaccgaggccaggtgggtgtggaccagcagccttcactcttgtggggaatgggagctgaagaaggccctggagccaaatcatgaagagccagcaggcagctgagactacaggcgtgcgccaccacgcccggctaatttttgtataagttagtgcattcttgtatgtttttgaagttcatccatgttgtaacattctgtcagtttttgctttaagtattttggggttctgttgtttagtacatttacctttgtaattgttatatatttttgaaagattgaccatttcatcatcatagaatgagatatatgagttttgtctcaacaatttttgtcttgatgtctgttttgtctgatatyaacatagctattctggttctctttttgttattgtttgcatggaatattttttttttccattcttggactttcaacctgtttatgtctctgactgtaaagtaagtgtcttatacctagcatgaaattgggccatgtttcttaatgtattgtccaatctctgattttttttgagacagaggctcactctgtcacccaggctggagtgcaatgatctgagctcaytgcagcctcggactcccaggctcaagccatcttcccacctgagcctcccgagtagctaggactacaggaacgtgccaccacatccagctactgtttattttttttttggtagaaacggggttttgccatattgcccaggctggtcttgaactcctgagctcaagcgatccgcccactttggcctcctaaagtgctgggattacaggtgtatgccaccacatccagccagatctctgactttttttttaatgttttttaaattatatattaatctttttattgaattaaggcatttaatgaaactttgacttttaattggagtgtttatttatattcaatgtaattactgataaggaaggacctctgtcatttcgttgaggtttgcttaggttatatcttcttttttcaattcctcattactgtctttttttgtttgtttgttttgcttttaattttttttttcttttagagatgggggtcttgctatcttgcccaggacttgaactcctgggctcaaaccatcctcccacctctgccttccaagtagctggtactacgggcatacaccaccaaatccagctggtttttaaatttttttgtagaaatagggtctcaccatgttgcccaggctggtctcgaatgcctgggctcaagcaatcctctcgcctcagcctcccaaagtgctgggattagaggtgtgagccactgagcccgttcagggtaaataatctttttttttttcttttttttttttgagacagagtctgggcccaggctggagtgcggtggtgcaatcttggctcactgcaacctccayctcctgggttcaagtgcttctcctgcctcagcctccccagtagctgggattacaggtgtgcgccaccacgcccggctaatttttgtattttcatttacttttattaattttattttttgagacagaatgttgttctgtcacccaggctggagtgcagtgtgcagtggtgtgatcttggctcactgcaacctctgcctcctgggttcaagcgattctcctacctcagattcctgagtagctaggactacaggcgtgcaccaccacgcccgactaactttttgtatttttagtagagatggggtttcatcatgttggccaggctggtctcgaactcctgatctcaggtgatccacccaccctggcctcccaaagtgctgggattacaggcgtgagccaccatgcctggccaggctgaataatcttttttttttttctttttttcggccaggctgaataatgttttttttctccttttcttttttttttttttgagaaagagtctcactgtgtcgcccaggctggagtgcggtgacgtgatcttgtctcactacagcctctgcctcctcggtttaagcaattctcctgcctcagcctcctgagtagcaggcgtgagccaccacacctggccccagccgaataatctttttttttttctttgaaacgaagtctctctcttgtcccccaggctggagagcagtggcacgatctcggctcactgtaacctctgcctcccgggttcaagagattctctgcctcagcctgccgagtaactgggattacaagtgtgtaccactatgcccagctaattttttgtattaagtagagacggggtttcaccatgttggctaggctggtctcgaactcctgacctcaggtgatccacccgcctcggcctcccaaagtgctgggattacaggctgagccaccgtgccaggccaaataatcttaattgacctattttctttgtttttttgagttggagtcttgctctgtctcccaggctggagtgcagtggcataatctcagctcactgcaacctctgcctcctgggttcaagcgattctcctgcctcagcctcacgagtagctgggattacaggcgtgtgcctctgcgcccagctaatttttgtatttttagtagagacggggtttcgccatgttggccaggctggtctcgaactcccgacctttgtgatctgcccgtctctgcctcccaaagtgctgggatgacaggtgtgagccgctgtgcccggccaattgacctattttcaagttcattgtcttttttcttctgcttcctcagacctgctattgagcctccctcaagtgatttttcatttcagataaccaaatctttatttggttcctttttataacttctttctctttattgatattctctgtttggtgagacattgttctcatattcctttggctctttgaacatagtatttatttatttttacttttttctttgaacatattttaaatggctaactaaaagtgtttgtctagaacccaggcttggtggcacacaactgttgtcacagctatttgggagggtgaggcaggaggatcgctggagcccagaagttcaagtcaggccctctcttagaaagtgtctagtaagtccaacatctgggtgtcctgagggacaatttctattattacatttttttccctgtgtattggccacacctgtgtttttctacatgccttgtaatttttttttttttttgagacagagtctcaccctattgccaggttggagtgcagtggcgatctcggctcactgcaacctccacctcccaagttcaagcaaatctcctgcctcagcctcccaagtagctgggactacaggcatgtgctaccacacccagytaatttttgtatttttggtacagacggcgtttcaccgtgtgggccaggatggtctcggtctcttgacctcgtgatccgcctgcctcggcctcccaaagtcctgggattacaggagtgagccaccgcacccccggcctgttttgctttgttttaaactgggtgtttagaatattataatgtagcaactctggaaatatgatcctacgccctctcccgggtttgttcttgctgtttgttgcagtagttatttgtttaatgacttttctggttgtaaagtctgtattttttgtcacgtatggccgtttcttcctattcttttagcccagtggtcagtgataggacagagatttccttaaacatctggaatcaaaaaaacccataaaaccctcccagagtttgtagaagggtctgtgtgcatgtggggtcagcccttccgcggttaaacacattttcaactctgccttagcttttgcttcctgtgtgtgcggagcctgaaggcggccagacgtgagagcttagcttcggccctcgcaggcctctcctgagctcctgcacagctctgtctgcgttccaggcccccatcgcccagagcattttattccctggcctgtttggttagtctgttgtttgcctcatctgctgtctgtggccccaggcagcagagaataataaatttgttgtgaatgtttcctacaaatatcccccaggtagcacctcagcactgggagaatgtccagtcaggtgagatcaaggccagcccttgagccatactcccgtccacagttgcaaataaagtctgttcttggaatcctcaggccaccaccagtctaggcagtgggagagggaccaggatgagttaaaatgcgacaaggccgtttgttctgagattcagctggtttatcttgataagtcttctggtggctgcaagcttttgagtagttccaaaaaagttgattgtgacttttttgccatttttaaaaattgcttttgaagtttcttgctctgctattttcttgatgtccttcaccgaatcttgaatttatataaaaataagtcttccctcagttccgcagatgggagaaaatcctgaaaagaaacatggtgaaaatgaaactgtggtgttgcctgcttgccagacatgattgtctgccctgggttttgggttcaggcctcagagtcttcacggatgaggcatctcatgccacagccccagtcagagactcttattccattatcagatgactggaacagaaaaggggaacagtttctgctactgggatttgagtgcatctaacagcagcagcctccgtgtcgagccctcccttctgtgggyggggcggggacaagggggaggttggaaggcgctgartgagccacctgccccttctccttcctcaggttgtctttctactcgggacactcttcctttgggatgtactgcatggtgttcttggyggtgagtctgtttctcccgggcttgcttttcgggggaaccatggctaaatcactcccttccctggacctcagtttttccagctgtaaaatgggtgggtagtggtggtgaggggggctaactgatttgtttataaaaacgggaggccctgggctgaccagtgtttgcctccggcctcagtgctgccatctgtgcagggggagggggagcgcctggcaggtgcacaggctaacacgtctgtgcagggggagggggagcgcctggcaggcgcaaggctaacacgtctgtgcagggggagggggagcgcctggcaggtgcacaggctaacacgtctgtgcagggggagggggagcgcctggcaggtgcacaggctaacacgtctgtgcagggggagggggagcgcctggcaggtgcacaggctaacacgtcctctccccactccagctgtatgtgcaggcacgactctgttggaagtgggcacggctgctgcgacccacagtccagttcttcctggtggcctttgccctctacgtgggctacacccgcgtgtctgattacaaacaccactggagcgatgtccttgttggcctcctgcagggggcactggtggctgccctcactgtgagcttctaaccctaactctatcccctgtgttgtccagagaccactccccagccaaccctagtgctgccctgggtacccttgccccactgagtccttccttgggcctcctccctgtcagtcctccctgggaccccttcccccaaccccagtccttccctttaccccatccttccccccagtcctcccctggaccccttctccccagtcccagtccttacctggaccctcttcattacccccaaagtcctcccctgggaccccttccccccaatcccagtccttccctggacccccctccatgcccccattcctcccctgcaccccagtgcacaggactcctttccgtgcaccccagtccttctctggacccctggccctactgcagttcttcccggggcctgtcagctcctcagtgctccccactggtcctccactaagagcgctctcttcccaccccaggcactactcctctcatttcccacctaggcccctcgctcccacctgggaccctgttcctccccctcctgctcatgcccatgtccctggtacctggacagccccctgcccattctcaccaccctctgctctaccaggtcygctacatctcagacttcttcaaagcccgacccccacagcactgtctgaaggaggaggagctggaayggaagcccagcctgtcactgacgttgaccctgggcgaggctgaccacaaccactatggatacycgcactcctcctcctgaggccrgaccccgcccaggcagggagctrctgtgagtccagctgakgcccacccaggtggtccctccrgccctggttaggcactgagggytctggacgggctccaggaaccctgggctgatgggagcagtgagcgggctccgctgccccctgccctgcactggaccaggagtctggagatgcctgggtagccctcagcatttggaggggaacctgttcccgtcggtccccaaatatccccttctttttatggggttaaggaagggaccgagagatcagatagttgctgttttgtaaaatgtaatgtatatgtggtttttagtaaaatagggcacctgtttcacaaacggtctcagtgcttctgttccttatggccgttctgggactgtgtttctcacatccgagggctcccctgctgggctcagcgcagctcagctatcaagcaaactcacctgctgtgatggtagaagccagaagccaacccgccccttgcgtttctcccagcacagtgctggggtcaagggtcaggtggatcagcacacacgagggtcatttcactgctgagaggggcctaaacaaaaggctgctgcaggttgaaggacccagcctccctcggggaggcccctgccccacgttcctagtagaggcttctgaatagaggcacttgagctgagagcgtggtgtgagtgagcaggtggctggacgcccccagggcctgagtctgggtggggagggcagtatccctgggaggtccgccggtagagcctgttgtcaggcctgaaggaccacacacaggattttagcctggagctgacgcctcagcccccttctgaaccccttccacaggttcgtccagtccctgtgtcctttaggcccaaagctggtctctctggcccgaacccctcccctctgttcatgtcaacccctgtgcacctgggggccacacttctgaaacagggaattcaggggctggttgccctgaaatgaatacggaacatacagagcttactttttcaatggagagtaaaaagggtaaatttgtctttttaaagtgggtaacttaagtatcttattccccggcccttgcaggatgttcctatcaggcctgagcctacggtgagggtaatgtagcactgggcggggagggcggggggcaaagatgcagcctgggatccccaccctaggggccaagatggaggagacctgcccttggcggatgggaaggaaggtgacccagacactgcagaactctcgctcaacgtcagggacttggctccacgcaggtgtcagacaggttcctggccaagaaagtcacactgaagcttcccagggccaaggagctcaggtatcccaggacgcagactaccaggatgtatctgggctcagaatgtgagcctctggcagtggatgggggagaggttcccagccagaccccgcagacagagtcacttggatcaggagcaaatgggaaagatgcagaggccctgacaccagccaacacctcagtctcctcccaggtgcaatggccttgaaagccaggaccacagtgagggatgagggcaagtctgtggacgcagctacagtgcacacgactcatgtggtttgctggggggcaggtggccgtgttgggacggccagtgaagagtaaggagcagaggaagctcggggtgagggagatgacgcagctgagtccagccgttggccttgactgggggagtctccgtgcttcacaaagaccaccggcaccacagctgtgagagcagagaaggaaagagctgtgctgaccacagccatccccagagggtcctccaaagccagaagggcccagctttggtttgggagccagtggcctctcgctgtttctgtgctgcccagctggactatgcatgcactggtctgcatctgatgagaaaagccgagacgctgtgtgtcgggctcaggaattctcacagattcccagcaccaagagagcagacacgctggagtgtttctctacccacacagagcgatggggaagctctcgtgcataattttaggtttacactgcccacacccttatggttttatggaaaaaaatagtattttctctcattgtacaaggagggtattttttccgttgtttctcacaggaaactcagattcttagccatgtaaatatcatttcccatggcgatgtcctcctggcccggcatttctcctaccttctgaggctaattggtttttgaaaaactcctgagtatttgatgagaggcagaaatttttttgagcttgttagctacaatatgttattgtggttttgtaggaaatcatacgtacttttttttttttttgagacggagtctcactctgtcgcccaggctggagtgcaatggtgcgatcttggctcaccgcaagctccgcctcccgggttcacgccattctcctgctcagcctcccaagtagctgggactgcaggcgcccgccaccacgcctggctgattttttttgtatttttagtagagatggggtttcaccgtgttagccaggatggtctcgatcccctgacctcgtgatccgcccgcctcggcctcccaaagtgctgggattacaggcatgagccactgcgcccggccatgtactttgttttttagagacagggtctcattctgttgcccaggctggagggcagtggtgcagttactgctcactgcaggcttgacctcccaggctcaagtgatcctcccgcctcagcctcctgagcagctgggactacaggcgccaccaccgcacccactgttgtggttacttttcttataggtgcatactgaagtatttaggagtgaaattttgtgatgtctgcaacttacaatatttcataacacaaaaacatgaatcaaacatggcaaaatattagtggctgttaagtctatgtgctgtgtatgtggggatcactaagctactctttgaaaaattttatcttaagtcaaaaaagtaaaactctgcctgagaaaattgtcctaagttcaaaatgtcattacctttacttttagtgggacaatatttatttatttatttatttttgagaaggactctcgctctattgcccaggctggagtgcagtggcatgatcttggctaactgcaacctccgcctcccgggttcatgccgttctcctgcctcagcctcctgagtagctgggattacaggcacctgccactatgcccgactaatttttgtatttttagtagagacggagtttcaccgtgttggccaggctggtcccgaactcctgacctcaggtgatccacccgcctcggcctcccaaggtgctgggactgtagacgtgagccactgtgcccggccacattatttaaacttttaacgttagttattaggacctgatgcaagaaggcagtgtttccttgacttcacacggcagtggtgtggcctgtggccttctggaccgcgttggtgatggggatttgggggtctgtgagcccccagggttggtctgggtgttttcccagaggcttgttgagccccaagcctgaatgtctgccccccgtgctctcagctgctgaccacctcctacgacgggaagaggcacgttgtctgcaatgtagggaatctttgttcttcagtctcccgctgcgtattttcaggagctggacagctcccaggtctcacccttcgcctcttgacttcccatttctgagacgtaacgagctgcggcattttgttagccttgttttgaacagttgtgatttgttggatctaagcctagttttgtttgttgtttttactttgagttgctgttttataagcaagcagcctagtttagacattttaatggcattacaaggacagggaatctccaggaagaatgaacagaccaggcaaggcatgtggtgagggcaatgcacagcagagggaagcttaggttatttggaattatgaggttccagcaatggaatttatgaatgaattagcccagtgaatgaatagatgatgaccgagtaaacaagacttacctgtgattccatggccctcgcctggggtcagggcagggtgggtgtggacgggagggtgtcgctgcaggtgctcacctgtctggctggaaacctccccccgcccacacgtggacaagcaacacagcttccctgcaggggtttcctgagtccagggccacaccgcaggctgcacctcagggaatccacaacacaacatgagagatttttgtcataactttgagcaatatgtacagcagttgagatatctaatagaaaaggtaatagtatgcttttggaggggtgtgggtgttcttcttttttgagacagggtctggctctgtcgcccaggcatgactgcagtggtgcaatcactgctcactgcagccttgacctcccaggctcaagcgatccccccgcctcagactcccgagtagcgggaagtatagatgtacgccaccacgcccggctaatttttatattttttttgatagagactggggttctgccatgttgcccaggctggtctcgaattcctggtctcaagcaatcctcctgccagcctcccagagtgctggaattacaagcgtgagccactgtacctggccagtagtacggtttttctaaagacaaaatgattttcaaattatgaatggatggaacagtagctaaatgaaattaaaccccatgttaggaaagaaacgtcacatgccaatgcttactgagaggcagatggcacaactgatctttgaaggctcatgtggaattgataatactttgctaaattctccagccctatttcagattaaaagacttacattttgtaatcaatcaattaattaattgataaaacatcctagtccacatcctgacctgatctattataaacatttgaaagcaccttcctctagacgttggacgatgagttgaaactcctagacagttatgcaggtggtttatggtatttgtggacattgaaacgcagggagggcgtgacttcttatgtcggagcttaaacgttaaagccaccccgtgaatccagtggctccctgttgccttctgctctgtggtcaattctggaccccatggagactgagacacaaactgccaccttcagaaactttggtccccccgaaaagtcctcacagttcagaatgtcacgtcctgccaggtgttttcttcccttggaggagacgtgcccccggcgtatagttagcccggctgccgctcaggaggagacgtgcccccggcgtattgttagcctggctgctgctcaggtgggagagcagcagagagagatgcattgccacgtaatggaacatgaattccaacaatgaaacaaccatggtgaaaaacacatttggaatattttagctgctggctctatggaaaatcaactctaaaaagacaagtatttatatcgaggaagacagaattctgtgactacgataaaagataatatgtgagacacttggcaaaattttacacatcaaaatgctcacacatatgtgtgtcaatgttaatggaaatgccagccacactttggatcttgagatcaggaggccctcatggcaccctgtgaatgtgagaacttagcttcaatcccagctactgcagacggggctgggtcacctgcgtggtcacagcctctgcgcctcatattctttgtctgaattacagaggcagaggtaatcttcccaaggcggtccaggcttcgctgagatgagttatgcagatctatcagcagaatgacttggacagggagaggttccataactgtcttctttccagagtcactcagagccattgtgagtgagactggaaagtagcccactgggaaaggaggctgggctagccccgagtgcccatgtgcagggaggaggtgacctggagccctgtcctccattggagcaaacgtctcacatctactagttgaaatggaggccttgatccacaaggagacacatgcagatgcacctttaaccccagagaaggacaccagtgcctgtcacccgggctcttgtgggccttgtaaggatgatatagttgcaatcagtaaggccaataaattacagattctgaggacaagagacagcattggagctggggtcatacagaagagttacctgtgggaagagatgcggccgccagatcccagatctattctcatgagaagcgtttcatggaaggggttggccgtggcatgcctgggatagtcacagggtttactgactagaaactgttggaacaagaaattccacatctctgaagtgaaaaagcaaatgtcccatggagagtgtccagaaagagatcttggccaggcgcggtggcttacaccagtaatcagaacattttggga

SEQ ID NO: 94223 - DNA, 31813 bp, Homo sapiens
tctgcggctccatcacccctgaggtacggggccccggtccccacggggtgcagagatcgaggtcccccggcagaggaggagtggggagtagaatggaaggagcgctcctctctggaagggaggctggtttggtgacagggcctgtcttggggtggggagtgtgtgggagaaaaaaacacctgacacaggctgtgcgccagtctcrgttccatcagctgttctgtggccttgggcagaacatctgagtcagcgctgggtttctcttctgtgaaccagaaatgtgacgtgtatcagggttggagcccatattccaggtgatgtgggtggaaggacctggcacgtggtatgtgccaatccatagcgggcactgcttctgggaggggtcgagtagcagtctgggagcctccgagtggagcaggtattttagtccttttaggcctttatgaagggataagccacgcacctcctgaccggactccatattctctcaacgccccctccctcccaggtgtggccaaacgtggacaactatgagctgtacgaaaagctggagctggtcaagggccagaagcggaaggtgaaggacaggctgaaggcctatgtgcgtgacccatacgcactggacctcatcgacaagctgctggtgctggaccctgcccagcgcatcgacagcgatgacgccctcaaccacgacttcttctggtccgaccccatgccctccgacctcaagggcatgctctccacccacctgacgtccatgttygagtacttggcaccaccgcgccggaagggcagccagatcacccagcagtccaccaaccagagtcgcaatcccgccaccaccaaccagacggagtttgagcgcgtcttctgagggccggcgcttgccactagggctcttgtgttttttttcttctgctatgtgacttgcatcgtggagacagggcatttgagtttatatctctcatgcatattttatttaatccccaccctgggctctgggagcagcccgctgagtggactggagtggagcattggctgagagaccaggagggcactggagctgtcttgtccttgctggttttctggatggttcccagagggtttccatggggtaggaggatgggctcgcccaccagtgactttttctaagagctcccggcgtggtggaagaggggacaggtccctcacccacccacaatcctattctcgggctgagaaccctgcgtggggacagggctcgcctcaggaatgggctgtttttggcctaaccctcagaaacactggggctggcacaaactcttggtttcttcaacaggagaattttactgtgtttcttttggttccattgtttggagacattcctgggcacagtttggtccgttagaattaaaagttgaatttttttttttttttaatttttttttttcctccaggacttgtgtgttttgttctgcgcacacaccgccaactgttcccccacagtcagcagcaggttgggcctgaccattgggacttgattgtcaagtcactggaggtcttgacttttttatctcagttcatgttctcttccataattggaaaggacctttgtctgtttttcctcttgggtgccttccagaacgcatctcatgtccctggtgagggaattggtgagggcctgctgtgagctgctgtggctgcgatggtcacccagctgggcaaatcactggagtgacaatttgacctgtcacctgagaaggatggtccctcagactgctgggtagagggcctggggcaggctggagagagaaagtgggcagagggtgaagggatcacaggggtcttggaaggtggcagtagtttggacgggggtggggagtatgtgggagaaaaaaacagactgaaggtagaatccttgggaacctttgaggagcggcacattctggcaggcacgttttctgtgagcctgaagttaggaagagacgttctggaggtcaatttcctacatcctcttacaggcggagaccttgaagtggggccaggaaggaaggttggcaaaacctttgaccagaactgtccttcatttacagaaactgacccagaccacaacacaaaaggccagtaaaagtaagaaaaaaaaattttttttttttttttggagacggagtctcactctgctgcccaggctgaagtgcagtggtgagatctcggctcactgcgacttctgcctcccgggttcaagtgattctcctgtctcagcctcctgagtagctgggattaccacccaccaccacacccagctaattgtatgtttagtaaagatggggtttcgcagtcttggccaggctagtctcgaactcctgacctcgggtgatccacccacctcagcctcccaaagtgctgggattacaggtgtgagccactgtgtccagccaaggaaaaaattcttgattggtgtatttgttttcctgagacttctataactaattgctacaagcatgctagtttaaattaacagatttattctgttggttcccaaagtcattggtggcagggttggttccttctggaggatctgagggagagagaatccttcccgtgactcctggtggctgctggcagtccttgcatcccttaggcttgtagagtcgtcactccggtctctgcctgtgttcacatggcattcttcactctgtctcttttttttttgagatggagtttcactcttgttgaccaagctggagtgcaatggcatgatcttggctcactgcaacctccgcttcctgggttcaagtgattcacctgcctcagcctccctagtaggtgagattacaggcgcctgccaccacgcctggctaatttttgtatttttagtagagacggggtttcaccatgttggccaggctggtctcgagctcctgacctcaggtgatccacctgcctcggcctcccaaagtgctgggattacaggcatgagccaccacgcccggcctatgtgtctgtcttgtatggacaccagtctggatttaggggccaccctaacccagtttgacctcatcttaaccgattacatctgcaaagaccctctttccaaataaggtcacattctgaggtttggagaggacatgaattcggggggcacacttcaacccagtataagtagtcaaataaatccaaattggccaggcgcagcggctcacacctataatcccagcacttcgggaggccaaggcgggcggatcacgaggtcaggagtcggaggttgcagtgagccaagattgagccactactccagcctgggtgacaacagcaagactctgtctcaaaaaaaaaaaaaaaaaaattagctgggcatggtggtgcacgcctgtagtcccaggtacatgcctgtagtcccagctgctcaggaggctgaggcaggagaatcacttgaactagggaggcggaggttgcagtgagctgagatcgtgccactgcactccagcctggtgacagcgagactcccgtctcaaaaaaaaaaaaaaaaaaatccaggctgggtgtggtggctcaggcctgtaatcccaacactgggaggccaaggtgggtggatcacctgaggacaggagttcgagaccagcctggccaatatggtgaaactccatctctactaaaaaaaattagccgggtatggtggcgcatgcctgtaatcccagctacttgagaggcagaggtgggagaatcgcttgaacccaggaggcaagagattgcagtaagctgagatgacaccactgcatgccagcctgggcgacagagcgagacttatcaaaaaaaaaaaaaaaatcgaaattaaagctgttgtgtgctgtcctgacagcagtcactaggaattgagtgtggataaactcacagggctggcctaattgtattttctttgaaggataaaaagcttctctaaaaggttcatattctttgactcagcaattccacttacaggaattttttaagagcaattacacaatgatagtctttatctcattgaacactcactgcaatttcgatggtctcattcgttcattgagcatatatattaggtgtgtcttccaagggtcatcccattcgggacttaatacagctggaaacagtggtggcccgcccccaccccagtggagctcaccttccagtaggtctaaactggtttgattgagttccatggaaaacaacaaagtggggtaaggggaaaagtagtggggagctgagggggtcagcatgacatggaagcagaaatcaagagacaaggctttgtggggtgcgggtgtgggtccaagtgccaagggccagggagctttgtagagtgtgtggttatgtttctcggtgtttcctcatagttggttaactaatacatttgttcatgcaattaagccatcttttcattttctaacatttttaaaaatacatatattttttagagatgggggtctcgctttgttgcctaggctggtctccagctcctcagctcaagggatcctcctgccttggcctcccaaagtgctgggattataggtgtgagccaccaggcccagccaattaagctgcattttaaaacaaccaagacagaccttaaaccttggagctgctgacccaagctcatcctcacccctcttccccagagtctaccccagggaggaacagggactggccagtcaggtgagggttctctagctttggcctcaagctctggtgtgacatgggtgctgttttcacctgtggagggaggtatgtcgcctggaataaaggctcgccagagggcagggtcttgtggggcttttaccatgttctcagcacctagatagtgcctggcacacatgagtctctgggatacagtggagtgagtgcagtgaacagatggctgaggaggctgtgtagatgggaaaggccttcgccagctcgcggggatgagctcaggccgggggactgagttctgtgtcctggctttgtttgttttttaagagcctggagtcacatcctgccctttttttttttttaaaggaaaaatggtggttttattcatttgtacttaaaccagccaaagtagtactgatgtgattatgattcagcaaatacaagatctctttccacaaatattagcataacaatcaaaatagggactatagtaaaacagccaaaaagggctgagggaatcaagtatgttacagtttaactccacctcagtataatttttattttattatttttttttaagacagagtctggctctgtcgcccaggctggattgcagtggcgtgatctcggctcactacaacctcctcctcctggggtcaagtgattttcctgcctcagcctcccgaatagttgggattacaggtgcctgccacccactcctggctacctggcttctttttgcccaagtgatttggtgaaacaaagcctcttcctccagcggacttggactcttaagtcaggggtgtcgtgtgtccacgctgtactttgtatacgcctctccctggccaggatctcaccctggcagggcaagggcaaaacgggccctaactgtaaggtgggtgggctgggataaggaggcctggaagaggccagataaagccagccccaaggtctggaagcctcccaagcatagccccctcccctcccacccacctgcctgtctgcgtgcttacctttaacctccacccagttgttacttaactcgcggtaaggttctgaccagtcccatgctccactccagaaacccgccagggaggctaagtccctgggctgaccctaggatgagggcaggaacctatcaggtaaaacctttctccctgcacactggaaaggccagaacttctgcccccagtcctgtcaggggaggggaggccttggcgtctcccaaatcacgttttctgggtcaacaagcctcacagctctagttaaatcctgggcagagctggcttggcagagatgcccacacctgtgcgtcacttcgtgccctacccagaaggggagcaggaaaccaagggatgaaaggtgctgggtccctggctgcctccttgcccatggctgagaagttctggtgggaaggaaccatggagggcccatctggatatccttcctcagctaaaactgcctccttccaggtaggagaacccggtgaccaggcaggtggcctttcctgtctaagcctcagtttcttgggggcgatgctgccagcccctcacagggctcagcgcagcacccagcatgcttggagggtgagaacaaattgaaaaaaratcccacatttttttcctctgaaaattttggtaagacggccaggtgcggtggctcatgcctgtaatcccagctcttggggatgccaaggctggtggattatgaggtcaggagttcgagaccagcctggctaagatgacgaagccccgtctctactaaaaatacaaaaattagccgggcgtgatggtgggcacctgtagtcccagttaattgggaggctgaggcaggagaatcacttgaacccgggaggcagaggttgcggtgagccggtatcacaccactgcactccagcctgggcaacagagcgagactccgtctcaaaaaaaaaaaaaaaaagaaaaacaaccgggcatgatggcacatgtctgtaatcccaaccactctagaggctgaggcaggagaatctcttgaacccgggatgtggaggttgcagtgagccgagatcaggtccctgcactccagcctgggcaacagagtgagactctgtctcaaaaacaaacaaaaaaaaaagtcaggcacggtggctcacacttgtaatcccagcactttgggaggccaaggtggatgtatcacgaggtcaggagatcgagaccatcctggctaacacggtaaaacccggtctctactaaaaatacaaaaaaatagccgggcgtggtggcaggcacctgtagtcccagctactcggaggctgaggcaggagaatggcatgaacccgggaggcggagcttgcagtgagctgagatcacgccactgcaccccagcctgggctacagagcaagactccgtctcaaaaaaaaaaaaaaaaaaaaaaaaaaaaaaaatcctcatcctcctaaagaggagactaggggtcagacaggatcacagagggaagtgtcttgcccatggtcacacagcagttcgacagcagagagggccagggtgaccagacaggtggtggtaaggtgcaaggaccaacattaaagtcagtaatctgggtttgaatcggctttgccacgtccatgtgcctgctgtattcctgggtgagttgattaacctctctgagcttccatttttccacctgtaaaatagggatcatctgtaattcacacaattttcatgagattccaggtgccaaacacagggataagtgcttaatamatgtttatttgttttgagacagcgtcttactctgtcactctgttgcccaggctgtagcgcagtggcgccatcttggctcactgcaacctccgcctccctggttcaagggattctcctgcttcagcctcccaagtagtgggactaccggagtgtgtcaccaggcccaactaatttttgtaattttagtagagatgcggtttcactgttgtggccaggctggtctgaaactcctggcctcaagcgactgacccaccgtggcttcccaaagtgctgggattacaggtgtgagccactgctcccagccgagtgcytacttaataaatgttaacaagaaaaacccaccccaaaaaaggaaagaggacaaacacaaggcaagggtgtttcagcagaggcaaacatcgcgagcaaaagcttgcaggtgggagaggccaaggccagttgctgaagtccttgccagctggcagggactgtgccctgtaagtgggggatgagtccagaggcaggcagggaccaggccacagtgaacttgtgggttttattaatcccaagtgtatgacggggcaggagagagtgtagtatcccaggcagatctgagttcagaaagacctgacccactctgtctgtctctctctcagccttagcctgccactctacagtggttaccatctgacctgatcagggtttgtaaatctgtatattcctttgtgaatttctttatttgctgccctctcacccccaggactgggtgctctgtgagcagtaccttgtcttctgttctccacagtgaccccagcatctagtccagggtctggcagagataatttcttccaatgaataagtgaatgaatgacatcgtttccctgtgggaaggtggggattgaggcagagttcctcagtctgctcctaccccagcccctcctyctgtccacacgcacctgcagatctgcccgcatgagtgggcactggcccacttactggttcccctgccccctttgttttctattgttcttcctggagagagagaacgcagtgccttcgtggtcaccaaaaggccaacggcgattccctctccagctgcatgatgaagatccctttgatttttccgtttacagtttcttctagttccttctataaatatttgtggcttttcaagtaaaaagccacaaaggaggtgagtgggctgtaaaggaaacaaaacagctttttttttttttttttgagatggagtctcactctgtcggccaggctgaagtgcagtggcgcgatctgggctcactgcaacctctgcctcccgggtttaagtgattctcctgcctcagcctccctagtagctgggattacaagcacggaccaccatgcctggctaatttttgtatttttagtagagatggggtttcaccatgttggtcaggctggtcttgaactcctcacctcatgatccacctgcctcaacctcccaaagagctgggattgcaggtgtgagccactgcgcccagccagcttttttttctttttttgagatagagtcttgctgtccctcacgttggagtgcagtggtgcgatcttggctcactgcagcctccacctcccaggttcaaacgattcttctgcctcagcctcccaagtaactgggattacaggcaggtgccatcacacctggctaacttgtatttttagtagagacagggtttcaccatgttgacagattttgaacctgaggtgatccacccrcctcagcctcccaaagtactgtgattacaggcaagagccactgtgcccggccacaaacggctgttaaacacaaaaaaagtgttcagcctccttcacgataaatgtaaatgataactactcagagaatccatttttccaccttacgattggcaaggatcaaagctggctgtgttgctgaagatgtgaggaaatgctggctcatgcactgctgaagtcggggaaacttgtacccctctgggggacaatgtggccatgtgtataaaaatgtcagctgggcgcagtggctcatgcctgtaatcccagcactttgggaggccgaggaaggtggatcacctgaggtcaggggttcaagaccagactggccaacatggcgaaaccccgtctctactaaaaatacaaaaattagccgggtgtgatggcacacacctgtagtcccagctacttgggaggctgaggcaggagaattgcttgaacctgggaggtggaggttgcagtgagccgagatggcaccactgcactttggcctgggtgacagagtgagactctgtctcagaaaaaaaaaaaaaatgtcaagtgcaggtcacctttgacccagcaattgcacttggaatttatccatgaaataacccacacaaggaagaaatgatgaaggtaaaatgttacccactgtagcttgggtaaaatattatccattgcttgtgatagcaaaatattggaaacaacccaaatgtccatcaataggcaactggctgaatacacagtagtacttccacaccatggagtactacacagcttcaaaacaaattagccaacggagtggcccttatgtaccgacacagcccagaatagggccctggttaaaaagggacatggagaaagtacaaggcaggcttgccttacagtctgctgctatatgtgggtataaaagggaaatcaatatatatttgtatttgcttgtaaatgcataacatatctctggaaaggtgataagaaactgataacattgactgctttgagagagaaggattaggatgctggaatctgggctcccagagagggaggctttttgctgtacacagttttgaccctttaactatttgttgttttttgtttgttttgagaagagtcttgctctttcacccaggctggagtgcagtggcacaatcttggctcactgcaatcttcgcctcccaggttcaagtgattcctgtgcctcagcctccgaagtagctgggattacaggtgcgcatcaccaagcttggctaatttttgtatttttagtaaagacggggtttcatcatgttgcccaggctggtctcaaactcctgacctcaagtgatccacccgccttggcctcccaaagtgctaggattataggcgtgagccaccacgcccagccagtctttgaactatttgaatgatatattatccaaaaaataccagaatttaaaaagaaaacataagaaaaagtgttttttccagcaatgtggacaggctttccaccttacaccacaggagggactccggctctgggatctcattcttggaggaatggcttagagcacctatgccacctcctacagatgagtccacygaggccaccaatagtagatctggaaaaaatacttgccctacagaggacagaaactgagggataatatcagtactacacaaagtgcctttttttcttttttttaactttttaaacatttgatttatttatttaaaaagatgggggtctcgctatgtcacccaggctggagtacagtggtgctatcatagctcactgcagcatcgaactcctgggctcagattatcctccttggccgggcgcagtagctcacgcctgtaatcccagcactttgggaggctgaggcgggtgggtcacctgaggtcaggagtttgagaccagcctgcctaacatggtgaaatcccatctctactaaaaatacaaaaattagctgggcatggtggcacatgcctgtagtcccagctacttgggaggctgaggcaggagaattgcttgaacccaggaggcggatgttgcagtgagccgagattgcaccactgcacttcagcctgggcaacagagtgagactctgtctcaaaaaaaaaaaaaaaaatcctcctgcctcagcctccaaatcactgggaccacagatgtgcaccagcatgcccagcaatttttgctttttgtagagaagggggtttcaccatgttgcccaggctgatctagaactctaggcttcaagcaatcttcccgcctcagtcttccaaagtgctaggattacaggtgtgagccactgcacccagcccacaaagggctattataactgacatgaaaaagcgaatcagacattagaaaaatgagccaaggatgggttaggcagttcactgacataaatgcatgggaagatactcaagttcactgcagcaggggaatgacagaaacactgagatggttctctgcaccctgtggtctgggggcatcctgggagaggggtgcctccttcacacacagctgctgggatgccaagactayagcagcattggggaaaaggattgcaaacatccctggacccaaccccacccctccatgcaatccaactcccagaaatcaagcccttcgaygtaaacgcatatccatagcagcaaaacactgaaggcagaatgaatgcccttccacaggcgaatccaggatgctcctgggaaggccatacggccattaaagacgctgaattagcagtgtccctgggragacagggaaggaggcgcagaggctaagaataaggactctggggccagacgtcaaatcttggttttgtgacttgagcatatgcttttactcctttgggcctatatgataatattagtacctatttcatgggtttgtgatgaagattaaatgagcaactgtgtcagaagtgtttatagcagtgtctgaatctagaaaggtactacttaaagtgtttgcgaagggctgggcgtggtggctcaagcatgtaatcccagcactttgggaggccgaggaaggtggatcacctgaggtcaggggttcaagaccagactggccaacatggcgaaaccccgtctctactaaaaatacaaaaattagccgggtgtgatggcacacacctgtagtcccagctacttgggaggctgaggcaggagaattgcttaaacctgggaggtgcaggttgcagtgagccaagatggcgccactgyactccagcctgggtgacagagcaaaactccatctcaaaaaaaaaaaaaaaaaagtgtttgctaagtaaatgtcttaaaaaaataataagcttgtcattgagtaagaaagttaagttgcagccaggcatggtgactcatgcctgtgattccagcactttggtaggcccaggtgagaggattgcttgagggcaggagtttaaggctgcagtgagctatgattgtgccactgcactccagcttgagttatagattgggaccctgtctctaaaaataaacatttttgaaaagctaagatgcaaaaatattgtcacctgcattggcaagaccctatagatgtctaggtgtgtctggtttcatgagcatagaaaactatgggacacatacttagtcgtcaacaggattgccagaggaggaactgtgtgtgtgtgtgtgtgtatgggggaagggggaagggagtaagcaaaataaaaatatttaaagcctcatgattattattattattattattattttcgagacaaagtcttgctctgtcacccaggctggagtgcagtggtgtgatctcagctcactgaaacctctgcctcctgggttcaagcaattcccctgcctcagcctcccgagtagctgggattacaggcgcctgctaccacacccggctaatttttgtatttttagtagagatggagtttcaccatcttggccaggctggtctcgaagtccttacctcatgatccacccactgcggcctcccaaagtgctgggattacaggctcctgctaccacaccggctaatttttgtatttttagtagagatggagtttcaccatcttggccaggctggtctcgaactccttacctcatgatccacccgctgcggcctcccaaagtgttgggattacaaggcgtgagccactgcgtccagtctcttgattatttttatgcagtcattaaactatatacatgcatatgtatagagaaagtttcaatgactaaaaataaggaaaccaagaaagaacttctctatctgccatggggccagggtcggggcaccccagcagtgtgtgaagagcagaagtccagccaatgacagactcttcccaaaacatcacttgcttatttcgaaatcaaacaatttctcataaatattttctcccaatgctgggaagagggagaggggaaggaggtacggaaactccatcaatcatttgaagggctgccttttatcagactgattttccgtagtgggttgtttgcagcttcctcctccccagttctgggcctcagctgtcaaaaggatttcaccatgcaactttttcatgctagcagttggggccaagaagctaatagatgggaaaaagctctgaaaactccaggacgacaaataggtgtcctcctcacagaaaaggattactgccccaccatccccaggtggccctcaaatccgttctctaaacggcagcagctgtttagaggtgtccaccaggtgtccgcagctttgtcatcctatccctgttcggggcagagactgagggctgctgacccggaccggctattttgggacgtgctgcggggggccttgggaggttggtgacgaaaggagtgcgtgcccgctaagggaggggacgccccggagcgtacactcataaacctggtcccgaggcctgcccctcaccaggatggtgcacgcggaaggggcggctttttagtggcgcaagggggctggtcggtggtagtttggggcggtgctgattgatggcgggcggggcggggcggtgctgattggcggggggggcggggtgaggcgacgctgcgctgattggctgggggcggggcggggcgtctcccgcccgggcctagagcgctgccgggggcgccgggactatgtcgcgggcgcggagccacctgcgcgccgctctattcctggcagcggcgtctgcgcgcggcgtaacgacccaggtcgcggcgcggcggggcttgagcgcgtggccggtgccgcaggagccgagcatggagtaccaggtatcaggcgggccagcgggccagcgggcctgggcgcgacgacacgtgggcctgcgctgagccgcagaacatccgggctccgctagccgagagggtatcgggagccctggactgggggactcggggggcggaacatcctggaggctgggggtggggacagggaccaggaagttgggcccgggccgccggggctgggaattcggagactatagcgtccccgccccgggttgggaagtgggaagtggcacaggagctaggatccagaagcccagaggctcagcggtgcttctggagttccagtgatcccggagtctgaaccggcagtgagagtggggaaagagggtagggaagagactcaggaattcaggcttgaaagatccaggagtattgatctgggggtgggctgtccaggattcagaagattggggatccaagtgcctggatttgggggagaggcaggaatcakgggtagtggagggccccagaacctggaaaatagaaaatgtccgcgggcgctgtgtcaagagccggttgccctagaccagaccctgatgccagtgaggcgggtggcactggtttgatgagggtggagcctccaaccagccttgaggtcctgagggtgggaggcacggaatatgaggcctaaggggaatgaaatagcacccccactcccacttccattgtgaaccctcctgaagccgtacctacctgccttcctggctgagtgacccctggcacacccctcctccctctgagttgctcctctgtgggttggaatgtggaaccccagagtcatgagggttggggtggagcttcggggaactccagaattcgaataccccarccttctgtagttctggccccgctctggcagggagcaatatagcaatggaccccattggagagaatgagggcaaaggcccaggagtgaagtcgggggagcctgggcaggaagcaaggctagcccgttagtcatgccaccttctttgtgtagcactccctgggtggggctgaactgccccagactcccatttttgccagagctggaaagatgccatactctctgttgcttaacctacaggctaggctaacagtgctggcatggcaggcgggcctggtactggccttgttgccctggcttggccactggtctgctggctgtctctgtgcctgtggaccctgagtgagccttaacctrctatctgggcactgtggttgccaggatgccgtgcgcatgctcaataccctgcagaccaatgccggctacctggagcaggtgaagcgccagcggggtgaccctcagacacagttggaagccatggaactrtacctggcacggagtgggctgcaggtaaggtagagagggcctgtgaccacctcccacccccatttgtgattcccgtagctgaggcagggaccttgtctgtctgtcccaggtggaggacttggaccggctgaacatcatccacgtcactgggacgaaggggaaggtgaggggcaggaccctggggtagggggtctattaagtggctggtggagtagagcctgcccagacaatcccttttctttcaagggctccacctgtgccttcacggaatgtatcctccgaagctatggcctgaagacgggattctttaggtactggcttgtggggggatgtggtgtctgtgtcccaatggaccctggggggctatggaaccagccagtgcttcaggaccagggtcacccccaggaggtcagctgcatgtctctctgcccagtgtttattcattcaataaacattcagttagcacttaccatattggcccatgtttatggcaacctttaattttttttttttttttgagactgagtctcactctatcgcccaggctggagtacaatggcacgatcttggctcactgcaacccccgcctgccaggttcaagcaattctcctgcttcagcctcccaagtagcttggattacaggcacctgccaccacaccaggctaatttttatatttttagtagagatggggtttcaccatgttggccaggctgttctygaactcctgacctcaagtgatccgcccacctcggcctcctaaagtgctgggattacaggtgtgagccacggtgcctggccttaattttcataattaaaaaaaaattggggaaggggcagcaactttaatgtataaactaaatatgtagcaggaggtccagtgtggtggctcatgcctataatcccagcactttgggcagctgacatgggaggatcacctgagtctggggaggtcaaggctgcagttagcagtgatcatgccattgcacttcagcctgggcgacagagcaaactgctatcttaaaaaaaaaaaagaaaattacatagctggaatagtcagatggtcagatgtctctttaataacttaaagtccaggttgagtgtggtggctcacaactgtaatcctagcactttgggaggccaaggtgggaggatcactggagctcaggagtttgagaccagcttgggcaacgtagtgagacttcatctctattaaaaaaaaaatgaaaagaaaaaattttaaagtccatatataactttaaaatcacatagagatatttatcaattagtatgtctttagagtaaggagaaaattgccttgcaagggcttaaacgataagggtggcttgtgccatccacgttaaggtctcctaggcgggctgcagataggagcccttctgcttggccactctccactgtggctttgccctggggcagcgccccctcttggtctcacttgtctagacttacacaagaggatggccaggtggaaccgggatcactcttcctgtgccacgcatgtcttctaagcccatcaccacgaacttctgaaatcagctgcctaaggtcatttcaagccgatatgttttccctaaacagttcttgttcaaataaagagatggagaggaggacttactacctgagtagctttgaggattgaaacataaggcaccaacctgtcttctaaaatcactttttgggccaggcgtggtggctcatgcctgtaatcccagcactttgggaggccgaagcaggcagatcacttgaggccaggagttcaagagcagcctggccaacatggcgaaaccctatctctactaaaaataccaaaaaattggctgggcacggtggctcatgcctgtaatcccagcactttgggaggctgaggtgggtggatcaccagaggtcaggagttcaagaccagcctggctaacatggcgtaaccctgtctctactaaaaatacaagaatcagcgaggcgtggtggtgtgtgcctgtagtcccagctacttgggaggccgaggcatgagaaacgcttgaacctgggaggcagaggttgcagtgagccaagattgcaccactgcactccagcctaggcgacagaacaagaccctgtctcaaaaataaataaataaaaactacaatcatttttgggataaaaacctagccttcaacttgggcccacatggccttgagggccagcccagggctgcagcttgaacattggttgtgggctttgtctctgagagctgtaagacagatgacattgtgggacagatgtcagcagagtgactgattggtatgggactgttggagcccatagaatgtgcaagaccagcctgggtgaggaggctgtcttagttgagaccaacgtggtgaatagggtgagccaggtgcagaggcctggagatagaagatggggaggactggggggctacagatagtccggggggatggggcaccaggaacaaaccgagggacacaggagagatgaggcacggaggccagtagcatcagtccctgcagggtgggggaaggccaggacgctcgggaagggagtcctgatgaccccagctgtcccggcagctctccccacctggtgcaggttcgggagcggatccgcatcaatgggcagcccatcagtcctgagctcttcaccaagtacttctggcgcctctaccaccggctggaggagaccaaggtgccgcatgcaggagggctggcgggtgggtatggttgggggtgctacgtgttccagcaccccatctccccagagaaggggctgcatgggctctgggccctgacatgtccctgtgccacaggatggcagctgtgtctccatgcccccctacttccgcttcctgacactcatggccttccacgtcttcctccaagagaaggtgtgtgccctctccctagaaccctgcatctgaggccttgggaacgggaacctcagcaggcctgggggctccctgcttccatgcggcctctgggcaccctcatatcccctgccatgccctctggtctttgacaggtggacctggcagtggtggaggtgggcattggcggggcttatgactgcaccaacatcatcaggtgagcgcagttgcttgggacgaggggtggcagccaggagcacagcctcayctgccgcctggtggctcagggcagggcctcatggccttttcctcccctgcaggaagcctgtggtgtgcggagtctcctctcttggcatcgaccacaccagcctcctgggggatacggtggagaagatcgcatggcagaaagggggcatctttaaggtgaccaggcagactgggggaagggagagacatggaaggcctgggagtctacgttttcatcctggcttcactgtgtgactggaacaagttgagtctcctctccagactatttccccattgaaacgtgagggatggctgggcatggtggcttatatgcttgcaatcccagcatttcaggaggtcgaggtgagaggatcacctgagatccggagtttgagaccagcctgaccaatatggggaaactctgtctctactaaaaatacaaaaattagccaggtgtggtggtgtacgcctgtagttccagctacttgggagactgaggcaggagaatcactcgaacccgggaggcagacgttgcagtgagccgagattgcgccacagcactccagcctgggtgacagagtgagacttcatctcgaaaaagaaaagaaaagaaacatgagggatgagagacagtggtagcccagacccagggatgtgggggccagagataggagtgtggaggatgctaggtagccctttctctctccttcttccctccacagcaaggtgtccctgccttcactgtgctccaacctgaaggtcccctggcagtgctgagggaccgagcccagcagatctcagtaagtctgaytggaatggggcagcggcagggtgggtttgtgtccctyctgtttgaggaggcactgcatcctctggggcctcagtttgcccatctgtgcagtgaggacgctgggccagctgccaggcctgctggaacacatctcagttctgggagcagggcttggtggctgggggaggggagagatgcaagggctgacgtggtcagggagggcctctgctgacccgctcctgcctgtctcccctagtgtcctctatacctgtgtccgatgctggaggccctcgaggaaggggggccgccgctgaccctgggcctggagggggagcaccagcggtccaacgccgccttggccttgcagctggcccactgctggctgcagcggcaggaccgccatggtgagtgggcagctgagtgggcaggcaggtgggtggcacctgtggagcctgcctaggagggtcccrgacacacttggtctcacacaccccgcaggtgctggggagccaaaggcatccaggccagggctcctgtggcagctgcccctggcacctgtgttccagcccacatcccacatgcggctcggtgagttagaccttcctgcccagctgggaccactgcgtgtgtctgtgccccttcagattttttttttttttttttttggttttctgtttgggagataagagacaatttgaagtggtgcttaagagaaaggactctgatgtcagcaaacctccctgaccttgagctcatgaactctttctgagcctgtcttctcatctgccaaagtagatgatgataggagccactgccacgggctgtggtggggattcgctgaggtgacatcactaaggtgctgagtgcagagcctggccaatgtgggataaagtgccagccagtggtagctgctgtcactgtcactatcatcatcatcagaccctgaggttctggaggatggtgatccagtcatctgcttcttgcctcccccaaagctttcagcacccagcaggtgctcatgctgttaagccccttcagcaaatggtgggcccgctgtgtgccacgcctgttatcaagggcaagtgacaaggtcctggagacaaaccgacctcgcatcacatcccggccccagctaagggctctcaggctgtcaaacgggaatagcaggccctttcagggttgcctgaaagattccaccagatgagacagccgaaaagcccaagccattgactggtgctagtaaaaagttcctgggctgccggggtcctgagtgttgagggcgggcgcagcctgcaggggagaacgggctcaggagtgtgtgtgcggaattgaggacgggggtgggagagggcctggaggactgccttgctgccctcccccagggcttcggaacacggagtggccgggccggacgcaggtgctgcggcgcgggcccctcacctggtacctggacggtgcgcacaccgccagcagcgcgcaggcctgcgtgcgctggttccgccaggcgctgcagggccgcgagaggccgagcgggtgaggggcggggctgggggtggggccggggctggcccacgaggaggggcgggatcttggggaagggcggggcggggtcgtggggaagggcgggggcgggcccatggggaggggcggggtcgtgggcggggacgggattggtaccgcagggagaacgggcggcgccctttgacccagctcctcacctctgtcgcagtggccccgaggttcgagtcttgctcttcaatgctaccggggaccgggacccggcggccctgctgaagctgctgcaggtgaggggccaacttgggggtgggcggcaggcagtcctgaagccctgggtctggcggtgtgaccctggggggtgccaatcccctcccccttgagttgtattgaggattagatgtgacaaggtgcctgtgctggttctgccaggtgctgcagggccgtggggaggccagtcataggtcattactcatattcccgcgtgtctagactcaagtccaggcttaagaggagggccagatcgtggctaaaggtgtagactctggactcgcttgtcatgcccctttaggcactagcatatcaccctggacgagaagcggcatttccccgagcctcagtttgcctctccgtaaaatggggttgctgctaggggcacccgcttctcaggtttggttgaaggagtcattgggcctttctctgcttggggaaactgaggctgcccaagctgtcagggctgaagtggcccctaggtatcatctcccatttcacagaccaggaggctgaggctgtatccagaacctctcccatttacccacagcctttttccagcctggatttggggccccctcactatctgagtgaccttcagcaagtccccttgccctgtggccactgttcccctgtctgtacagtaggttggggcttcgctgctcaggccacaggccaggcagggtatactgaggcagatgggggcagggtgctgaagtaccttggctaggtttatacagcatcattctagttgtcagggaggctgcatctccagagatgtgggcgcagggggccatatggaagttggtggacatcctttcgggggtctgacaccaagtctttcccttggccttctagccctgccagtttgactatgccgtcttctgccctaacctgacagaggtgtcatccacaggcaacgcaggtgagaggtgacaggcatggcccctrgggatgagcaggggtccctgaggtagacagtgggggcttccaaactggaggtttggggtaggaaataaatttgttttactgtgtaagaacactttagtgtacttatactcttttatacaccaaagtatactttatttaattttattttaaaaaatttttggctggccacggtggctcacgcctgtaatcccagcactttgggaggccaaggcaggcagatcacgaggtcaggagattgagaccatcctggctaacatggtgaaaccccgtctctacaaaaaaaaaatacaaaaaattagccaggcgtagtggtgggtgcctgtagtctcagctactcaggaggctgaggcaggagaatggcgtgaactcgggaggcggagctggcagtgagccgagatcgcgccactgcactctaggtctgggcgacagagcgagactgtctcaaaaaaaaaaaaaaaattaatttttgagacagagtctcactctgtcccccaggctggaatatagtggcacaatctcagctcactgcaacctctgcctcctaggttcaaatgattctcatgtctcagcctctggaatagctgggattacaggcgtgtgccaacatgcccagctaagttttatatttttagtagagacagggtttctccatgttggccaggctggtgtcaaactcctggcctcaaatgatccacccacctcagcctcccaaagtgctgggattacagttgtgagccaccacgcccagccagcattttttattttatatgaaatagagtagaatagaaaataccagtgtacgttgcacagagtaagggtaggtcctgtttggtgaagattagtctgttccaggcatatgtataagtatgtgagtactgagttgcagtgtaaaatgtgttttttaccatgtatcatgttaaaaaaagtttgaaatagtgtaaaaattacagatcccaggctggacttggtggctcacacctataatcccagcactttggcaggaggatcgtttgagctcaggagttaaaagccagacctcatctctataaaaaaaaatagaagaattagccaggtgtggtggtgtacacccgtggtcctagctactcaggaggctgaagtggaaggatcgcttgagcctggaaggtggaggctgcagtgagtcatgaagtcgtgattgcatcactgcactccagcctgggtgacagagcaagaccctggaccctctctaaaaataaaaaatctccagtcctcacatcagtctggttggggagagttctggaatctgcattttttttttttttttcttgagacagtctcgttctgtcactcaggctgcccaggctggagtgcagtggtgccatctcggctcattgcaacttctgcctcccaggttcaaatgattctcctgcctcagcctcgtgagtagccgggactacaggtgcacgccactacacccggctaatttttgttttttgtttgtttataagatggagtcttgctctgtcgcccaggctggagtgcaatggcttgatctcagctcactgcaatctccacctcccgggttcaagtgatactcttgcctcagccttccaagtatagctgggattataggcgtgtgccaccacacctggctaatttttgtccagctaatttttgtgtgtgtgttttttttttcagagacggggtttcaccatgttggccaggctgatcttgaactcttgacctcaggtgatccgcccgcctcggcctcccaaagtgctgggattacaagtgtgagccactgcacccagcctggaatctgcgtttttaaccagcatccccagaaataactatgctcacctggtgatggtccccagctggatgtacattttatagatggagacaatgaggccagagtggggaaggggtgcctagtgggcaaaagctttggagtcagactgtctggctctgcctctcgtgaccttggtgaagtcactgaacctgcctgagcctcagtttcttcactgtgtgcatggagaaggccactagccgagactgctggcctgatgacgtaaaaggcttggtgcgaagcaggtgctcacggtgcacccgcccctttctccacccctgtcccttactccctctccccttcgctgataggcctttctctgtgccccacagaccaacagaacttcacagtgacactggaccaggtcctgctcygctgcctggaacaccagcagcactggaaccacctggacgaagagcaggccagcccggacctctggagtgcccccagcccagagcccggtgggtccgcatccctgcttctggcgccccacccaccccacacctgcagtgccagctccctcgtcttcagctgcatttcacatgccttgcaatggatcasccaaggccgagaccccatcttccagccacctagtcccccaaagggcctcctcacccaccctgtggctcacagtggggccagcatactccgtgaggctgctgccatccatgtgctagtcactggcagcctgcacctggtgggtggtgtcctgaagctgctggagcccgcactgtcccagtagccaaggcccggggttggaggtgggagcttcccacacctgcctgcgttctccccatgaacttacatactaggtgccttttgtttttggctttcctggttctgtctagactggcctaggggccagggctttgggatgggaggccgggagaggatgtcttttttaaggctctgtgccttggtctctccttcctcytggctgagatarcagaggggctccccgggtctctcactgttgcagtggcctggccgttcagcctgtctcccccaacaccccgcctgcctcctggctcaggcccagcttattgtgtgcgctgcctggccaggccctgggtcttgccatgtgctgggtggtagatttcctcctcccagtgccttytgggaagggagagggcctctgcctgggacactgcgggacagagggtggctggagtgaattaaagcctttgttttttaaagaaatggcaaagccttcgactgacccttgaccccctgctccctcagcagagacggagggaggggctgctggtggtcagggacctgcactgtgtagagggagcctggctgtgtggcctggaacaagtccctccctccctgtgcgcctcaggtggcctgtctgtgagatgagaagaagaccagactgaagcctgttcaccatatgccaggcagtgctttctgcagacccccttgcagagaccttgtgatggagaattatacmcatttgacagacgagggaactgtggctggtttcaagaagccatggaggccgggcacggtggctcacgcctgtaatcccagcactttgggaggctgaggcgggcggatcatgaggtcaagaggtcgagaccatctggccaacatggtgaaaccccgtctctgctaaaaatacaaaaattrttagctggacgtggtggcgcatgcctgtagtcccagctactcgggaggctgaggcaggacaattgcttgaacctgggaggcagaggttgcagtgagctgagatagatagatagtgccactgtactccagcctgggcgacagagcaagactccatctcaaaaaaaaaaaagccatgggacctgcctacagtcacaggccaacaaggtggcaggtccaggatttgaacttagagcagtcgagggcctgtgttcggaaccccagagtgagagtgtggatggggcctcctggtgtttgctttcttgcagcctagaccctggggtgtgctgtcgagtgggtgaatggcagaggggaactggctgaatgaaaacctgctgtgccctggatgctgctactgttcaggatgccacccctgccaccaggccagcccagtgggggccaactacaaaagcagccctgtcctgtgccctcaccccaccctggctttgaatgtcactgcccttctcccagcccaacccatcactggtttcatggtctgatttattggtggtgaatacacaggggcaggcccaggacaagcagcttggctactccccctctgctggctgcccgaccggcagagggggctccatgtggcaggagctaggctcccaacgcccactgttcttgccaccctctgggctcccaggctgggctccgctaggctcctgtctcccctgccagttagttaggcaagttcaggtgtggaggccgcagggatagatccaggtggctctgggctgggccctcttctcttcccagcggggaggtgctgttggcctggctgggctggcctgaatctgtttcaagttctcccttcctgcccagctcagttcaccagtgctggatccaggttcaaatgacagggacttgggtttttacaacagcgtggcaagtggtctgtctcctgggcagccatatcccagacccactgggttgaaggttctgtggggtggagggaccccaaggtgttccaagccagtggctgcactggcagcaggcctctgagagggaggcgggaagggtaggcgcggagagcaggctccattctgggtcgagtggaggactggctcccagggtgagttcacaccagtgctcccagctggcggctgctcagtctctcctgctgggcgagcgcggggggccggggctatgccatgctgctgrtggagcagggggtgctctgggtgctcccgatgctgtggttggtgctgctgctctccgaggaggccggggcagccaccgccaccacgggctcccgcttgctgggggaacctgggagcgggagcgggggcaggggcggaggtcagggtcctggccagggcccctcaatccctcagaggcttcactgggctcccccgggtggatggaggggcccggcatgctcactgtgggggcctggggtactcacgcgtgtgcgagtagatgtaccagagtgcagcagtgagcagggccccgatgaggaaggcaccaaaggtgatgcccagcacggcgggcaggacgaggcctttgcttgtgcaacctagagagggccgacgccatcagcactgccactctgcccctgccccatcccctaccctgttgtgctggcccgtgtgggctttggtgccagctctgctcagccatggaccctcgacttctctgaacctcagtctcctcttgcagcaaacgggctcatcacagccaggcctggcattgagccatggttgctaggactgtccacctagagggcccagccaggccttttgggtcatgcctctgcccctcaaggctgatggagatggcgttttcagggaggatggatggggtaacgtgaggaaactgaggctcgggagtacagagcctgccccacctgctgcatgaccttgggtcaaccctgcccctctctgaggcctttagcaggtagagaatgggccagagcagctccgagtgccctgcagctctgctcttggattgctccaagcctcattccctccacattcctgactcctgtgtggctatgggccaagcagtctttccttgagcctctgacatccgattctgtgtcatggggttatcagccctgccttcttggtcctgggctgggagtggaggctccatcctggcctggatggggtggcaaagaggtaggtgcccccatccctcacccctgcctctgccaccagtgtcgggactcttctgcctggtgtgggcctgggcctggggggaactgatggagaggctagagggggcgtcctgcagggagaggcctcaaggaaggcaaggccagcacccaccctcaaagggcctctgtctcacccaggagactccatcctcccagcaaggtcagccaataactgtggggatggagtggagccgtgagtgggggcagaggcctagactcccaccccacagggcggtcccgggcaagggctctccatctgcaaagtgcagctctggcccctgctctaggctgctatggctctgggaagccctcctcctgccccttctgggccgctttctctggggtcccccttgccatgtgctatgtgcccaggccgtttctcagggctgcccgctgtgccctactgtgacctcagccactagaacaaacccgagagacctggagggagctcaccagacaggtcagggctgatgatgttcaagcgcatgaagacagtcctatggacttcctggaggagaaagagagagcagtatgtggcacctttgggaggcggcttccaggtttactccctggctccgtgaccccagcccaccctagagccttggctttgaatcccatctccactgcttcgtagctggatgcctctgggtgagtcctggaagatctgtgctgtgggagggtgcctagtggacgatccctggctgctgctgaaatgtttcctgtgagttcctggaggccttgatgcccaggagcactgtggaagcactatgcatccctcacccttgtgaacactttggagctatgagccaggtcagcccagagtcccaggctcactctggctggagggagaggcccacttaggggagttgaaggcttccctagcttcctatgaccagagaagtttgtaatcctggaggcctgtctgtgcaagggcctgggggtgactctgggggcgtccaggatagattgcctgagagtgggggtcaccagatggtgaagtgttgtgactggcaaatacagaaagccaggagtgtgtgtcctttgtccgcctctcttccctcaggtctcctgttctttgagattacactggtgaccatactacatggatgtgcgggtggttagattcctgggtgggagggtggatggatggatggacggacgggtaagtgaaaggatggatggatggatagatggacagtggcagctgcatagtctgccagtgccccagacacagcagtcccaccagaaagctctcgggtggcagaaagtgctgctggcagccagactgccaggccacatgcctgattaaggctccgcccctcaccagctggccccacatccctgtgggctgccatgtcccttcctgcaaaccacagacctggaagctcccacttgaagctggggccggcccaggccccactcacctggtcttgagacccggtcttgggacgcagggctaccgtgcagctgagggtgccggttttgggtatgggtactgtgtagaagtggaggaggaagctgaagcgcgggtcaccctcggggcttggggacagcaggctcacacagttgcccttggccgcccggccctggatgagttccacggtgcctccctcaggccccaagtccaggtggcagctgtctaactggagcaggaactcggagacggatggggacactctgacctgcatgggtaggtagggccacgcggcatgggcagctgctcttcaccccaccccacctgctgccttcaaatatcggctagaattaagagttcccacccctgagtcctcacagtggaaagaaagacatggacctgtctggggcagaggaggaggacagggccacatccttgtcagtgtccctgagcaatgccttctctgtctctccctctcccgtgcacccaggctgtctccctcctgactctgggagtctcatctcctctggagtcatggtgggaagaaaggcggagaggaagttccaggagctgggaggcccgaggggtgacaggcatgccaggtacctgcacaaagctctrctgccccggctcgatggtgttggaggcctggaggaagtgygggctgaggtagaggcccagctggaaagagaggctgtccatgttgaggcagtgcacctttttctgggggaggacgggagggagacttggtcaatctggcggcgccagccaggagggcgaggggtgtggggaggaacaggcatcatggccctgtggagttgcctgactctctttttttttttttttgagacggagtctcgctctgtcgcccaggctggagtgcagtggtgcgatctcagctcactgcaagctccgcctcccgggttcatgccattctcctacctcagcctcccaagtagctgggattacaggtgcccgccaccacgcccggctaattttttgtatttttagtagatacggggtttcaccatgttagccaggatggtctcaatctcttcacctcgtgatctgcccgcctcggcctcccaaagtgctgcgattacaggcgtgagccactgcgcccggcccttttttttttttttaaactaatatttatcaaggaggcaccagctgccaggctgtgtgaagagcttccacacagcacctcattggctgcccagaagcaccctgtggcgcagagtcctttcttaggccacctttgggcccagaaaactaaagtgacttgcccaaggccacacagccagtatgtgctaagccctctgacttgagagaccgagagcgtcaccctcagcagtcctgctccggtcatacagaaggggagaccgaggcattccagacacacatggcttgccaggagtttcccgaggcctgctccctcccaggccaggaagaggccccggcccagcagcagcccctgggccaggtgggttagcacgtgactgtccatctcacccgctgtggtgatgagctcgacaggatattgaccaccgcctgcggggataaagccagggagctggtcagagccagaaaggaccccagagggtatcccacccaatacgcccatttttgcagatggggagactaagccaaccaatggccaagcttgtcttgtgttctgagcccctgcagcctgctctcccaaacacacctccaccctgggggatcagggagggcacctgagggggcaccaaccaggctggtcctgatacctttttggccccagctcttacctcattgctgatcatacttgctgacacctgcatgccacagctggagtaagcaytgcgcaagacaaacttgtcacccctgtcctctgcctcacagctggggtcccagaaggtcaggcccgtgatggtgcacttcaaatgctgggtcggaagagaggggcaccatcaggaggcactggggtctctgtggcctgccacaccccagcaccaaggactgaccacaacccaggggtcccaagtcacagccattcccctgccctgctccctcttcatttttgttagatgtcatcatcctacaccacttaaaagttcttttttttgagatggagtctcactctttttgcccaggtgcagtggctcgatcttggctcactacaacctccacctcctgggttcaagcgattctcctgccttggcctcctgagttgctgggattacaggcacgtgccaccatgcccggctacttttttgtatttttagtagagatagggtttcaccatgttggccaggctggtctcaaactcctgacctcaggtgatccacctgcctcggcctcccattgcagggattacaggcgtgagccaccgcgcctggccaaattttctta

SEQ ID NO: 94224 - DNA, 15759 bp, Homo sapiens
ggatcgatgcggatgccatcgtggagaagatcgtgcagagccaggacttcacagatggcagcaacaccgagggtgagccgtgctgggctggtgggggcgaggccacctgctccaagggctggccctgccgcgctcagcctccatcctctcctgtgtccccacagacagcaacctccggctgttcgtgagccgcgatggctctgccacgctgagcggcatccagcttgccaccaggtagggcaggcttagggaggggtcgtcggggcggctggggcttgggggtgagagcagagtccccacagtccactcacctggccttgaacgccaaatcttgtcgccacagtgtgaccctgggcctgtcatgtctctgaacctccctttccccatctgtcaggctgtgtggacaccaccacctcacctgggagcctggggcagtgagggcacggacaggttcggtggtttcccacagttcacaaggtcacctccagcaatgcctggtgcagggctcagcacatggcaggggcctcacacgcatttatttagaaccctcccttctacttcctcccagctccagggactcgggaagaatggtggtggtgatgcctcatgggtttactgaacaaatctttccctagcaccagctaggcactaggccctaagtgaaggcctggttcaatgcaggctgctgcctacacagcatccacagatggcaggggtagatgggaccaaagttgcgggaacgacagtttatagagtgctgcgtcacagacattcatttggagcatgttgactatgtgcctggctctccatgtgctttggctaaccaaatgaatgagcgagtgagcgaatgagcttcccacaggcgggctgctgagggcaggtggggagcccgcctaacatccacatccccagggaagaggcgtggccaggccgctgcgcagaggctaccctctcaagctgctctgctgactcctgctggccacggcctggaatggcagccatcacctcccagtagcctcctgggctgctctsgggtgggggtgagggggcggtgagcaagaaggaaactgaggggctggcttccttatgggtttgtaaacacacccctccctggccccctctgaaaatgaggaagcatcttggggaaagaaaccaatctggttgggagcgagatcacagcagagctacatgctgagccccgagagtccccgactccagggctgggcctgggctcggcagggaaaggagctgaccaggtttcctgacttcccactgccctcttggtcaccctcacatccctctgagcctcagtttcttcacctgtcaagtggggcaggatgcagtgactccctgccgaggtgaccgtgaggatggggtggcacagccagatgtgcccrgaagggctctgcaggccccacagactctgatgcttactatctgtgtcactgtgggcaagggacttaccatcgctggggcacggttttagcccctttgcaacacagggctggttaacagtacctgcttgtgaaacacctccagaggcctggtccagtggagcgctcaggaaatggggtatcgagggggacatgctgacctgtctctcacctgcagggtctcttctggggtctacgagccagttgtgattgaaagccattgaggagcaggtgtccgggctggagaagagtcctgctttctctggagtccagacctgtatcattccatgaggaactttccccttcagatcacctctgcgccacatctcatccatgcctcctccatgcactccagtccacactccccgtagcatcattccattgcccctcccatccatgctgggaccctcctggcccaccaaggcccaggcaccactgtgaatattctcctctgaaccactagagggcaggccaggcaggccaggcgggcccgtgcagcttgtgggcaagaaggagctggcaaggaccggcgctgctggagactgacccagccctctggctgaggacatgcagcagctcctaaatgtagagatgcctgtggctgagggggcctctctacctgtgtccccactcactccaggagcactggctttggtcacgtcttagcagcagggccttgctccgttgttcccttgccctggtggtgggggggccagaccgcctccggaatcctgccacctgtgactgtctgactgcttagtgcttcagctgtcccttccttgtgtcctgggggacctgctggcggcctcttcctgggagccatgacctcagaccccacccacactccagatcgagacccctgcctccccccggcaaatgtcctcccgctgccttgcagcctgcactttgcacatgctcacccccagcacagtcccactggcccctcacctccccttccctgagctccttcccaaggactcctggtcactgcctgctgtgcagtcagaggcccagggtccagcagcccggcgggaacgggtgctgcctcttcctccagttagctccagctcaggtctgagacccgtgctgagaaaggtctgagcaccgaccgtgccctctgcccagggctgggtcctgagcagctggttttcctgcaggaaggttggagcaagcaaagtccttctctgccctcagggtcagctgcccagactggggcggatgccagagaggcaggtgggctgtggctggactggtccggagctggcttccttaccagaaaagcctcagccttcctctggaagcatcccccgttctgggcaagggggaagggctcctttaaggggtgtgctttcccagtggggagcagtctggccctgccccctactaaagcctctgctctcagcactttcccccaagtccttgtaacttgcttgaaggtgggttctggctgccagccagtccctggacaaactctcctgccccttttaaatttcactcattttgtataaacccagcaggctggtgtttacttagccctgtagcttttttcattttttctttccgtctttcttcttgagttcacggttcaatattgcctcctcgccctggtgaggggaggtgctgcttttctgccccacctgccggctggttccagcagcgctggggcccagctggggggccgggatgggggcttctctctctgggaggggtgcaggtgccctccccaggctgggagggttccttccctagctccccatctgcccccgctggtgagagttgggcttcttggtcttggaactccctggcattgggaacagagcatttccagcatttgttgttgttgttttactcacctaacccttagaaaatgaatgttagaaggtgcctgccgaggcgggacagagtgtttgctcgcgctggagaaggctctgctcagccctgagagtcccttcctgccccaccgatactggcactttaaaaaggaagctgaccgcacagtgtccagacgaattggcccccagaagatggggagttctgtcctgcccttctgtgtctgcgtgacctcacccagcctaggagggaggtgcattcagggtagatttgcctctcattcaaagttctggggctttgggcggaaaacagccagctttggcgctgttggggagactcctccagaccaggaaccccagaaggagacagagcctgccacatcctcccacgccaggccctgggccagggtgattggactgagaatttggccacaaccaaattgatgctggctggaaccagaggccagaaagcctggccttgtccccatgtgggagccctgtcctcagccctcttgtccccttgagctcagtgaattcccaccaggtgcccacagctcctggacttcaaattctatatattgagagagttggagagtatatcagagatatttttggaaaggagttggtctatgcaatgtcagtttggaatyttyttgaaagtttaatgtttttattaggagatttaaagaaaataaaggtctacaatatctttaggtttttttttttcctgtttaccgcacaaactgaccacatggcatgtctatcaggatggagggtgtccatgttctcctctgtctttagggaggtgataaggagatgggcggaggggtgtttttttctttgactcccctcctttctaacagaatgttgccaccactgcttgagtgggctgtgtttgttcctctgtcccagcttctgttgtagaaaataacattgttaggggaactcaggctagtgtcagcgtcttggtttggggagaaaaaattaaatgtttcggtttttgtttcttttgctgttttgtttttaccttgttactttatcatattgactttagggtcaaaggcaacatcagaagaagtcagatatgtatagtgacattccaggggtggggaaggtgtagggatccagggttctcccggtcttggccacaggcacaatcatcaccttcatcgttccagattcctggggagaaaactgagaagatcgttacctgccagcctcatacggagcaaaagctctgtcctcagggccaagttctaaccactgctctgtagaccttctctgcaatcaagtggcctctaaggagcatgcctgaggacaaataactgtgcctcagtttcctcacctgcagatggggttatcaaataacacgagtgtgcagcctgacctgcaggaggtgtgagtgtgttcccaaactaaagccccaggctgccatcatttacaggcttggcttgccccgggcccctcacccccgtttctgaccatcccaagtctctctgggacaggcaagtcactctggttctttaataagcttggaggtgttgggaagcttcagtggtactggccaggccaggaggaatcaggccaccagggctccatctctatcctgggatagcattcaccccactcctcctcagggctgaccccgactcatggcccctttaaaccctgaaggccgattctgccccttcctctgttatatgcacaactgaggaaggaggtaaaagtgggctcctaggtgagcccaaagtctcctgagagataagggaaaagaattggactgtaggtttaaaaaagttgctcttggccgggcacagtggctcacgcctataatcccagcactttgggaggctgaggcaggaggcagatcacctgaagtcaccctgaccaacatggagaaaccctatctctactaaaaatagaaaaattagctgggcgtggtggtgagtgcctgtaatcgcagctactcaggaggctgaggcaggagaatcgcttgaacccaggaggtggaggttgcaatgagccaaaatcgcgccattgcactccagcctgagtgacagagcgagactccgtctcaaaaaaaaaaaaaaaaaaaaaaaaaaagttgctcttgtcagctttgggagggcagactccatagttggagatgggcttccaaccaaccaaggagataaatgccagagggagcgaaccatgccaggctcaaagcacatctctccccaaactccccaggtggggacagcaggccaaaggcctccacataacccctcagggaggcctggagtccagatgctgtactccagtatctaaacaatcactgaatcttaaagctgacaggttcaaagctcttactttgggccgagcgcagtggcttacgcctgtaatccaggcactttcggaggctgaggtgggtggatcacctgaggtcaggagtttgagaccaacctagccaacatggtgaaaacccatctctactaaaaatacaaaaattagctgggcgtgttgacacgtgcctgtaatcccagctactcggtaggctgaggcagaagaatcgcttgaacccaggaggcagaggttgcagtgagctgagatcatgccactgcactccagcstgggtgacagagtgagactcccgtcttgggaaaaaaaaaaaaaccaaaaaaacctctttctttgggccaagcctccactgagtgccagggatacagcagcaacctcagaccctaccctcggggctgacagggctggatcaacaattgcatcagtgaattaaaaggcacaggaggctgggcaccgtggctcacgcctgtaaacttttggaggccgagttgggaggatcgcttgagcccaggagttcgacaccagcctggataacatagaactccgtctcaaaaacaaacaaacaaacaaaraaaacgttcccgactggcttccctgaggaacgtggcgtcccagtgagaccggatgggtgaggagcagccggcctgtgagtggtgggggaccgcgttcctatctcggagctgaagaagcgtggaagatgatctggcccaacatctctttgttctcagaggaagggccttccaagaccggggaggggcctgtgcgtgggtcccggtccgaaacgtgtctgggctgctgcgagagrcagtcggtgaaggaagggaggggacatccgaagggtggcccgggaggccgggcgatggtgaggagggcgcctcctctccaccaaatcctccccatccatgcgggctagggacagaccctcccccgcccaccctaggctggaaagtgaacgttctctgcacctctcccacctacagactaagtagggcacccggtttccgtgtcggcttcaccactgactcggaatgggatctacctttctctgagcctcacttttcccatctgaaaaatggaacttccgatcccgcactcccatcccactctggccccgggactctgggatacttagagattggcttttggtggggcggcgacaggactgtggccatgaaggccagggagtctgggtccccaactcggtcccattccctagagagattcgggcagcaaccggccccacaatgctcttgagaactacacttcgccgatatgcaaaggagaggaggcggttcctgctcgtctccgacgaggtgggcccgagcaggcctggggactacgactcccggcgtgctccgcagtccaaagccggaagagcgtggacccggaaccggatgtggcttgcggctcgggtggctgagcgcgcggggaaatggtgagattggcrccgtgtgccggagataggggcgtctgggggtggggtcccgggtctgctcaggagctggggcatgggcacttggaacggggattgctctcccgcccccactattgtacggacgacaacgcggaggcctagcattctctcccagcctagaaactgatccctagtcagccytctaccatctgttgaatgggaagcttagaccgtgatcgggccgcgacgccccgcttccattagtgcgccgaaatagagggtcacttcgtcagctgagacctcccttttctccaggccacggggacagaccaggtggtgggactcggcctcgtcgccgttagcctgatcatcttcacctactacaccgcctgggtgattctcttggtatgtcattctccccgtccgctgctcaccttccccgagccctggcaccgccagagcaactactatataggctctaggcacggcgctggcttcattgcctgcctcatctcttgaactctccagaacaactctatgaggaagatgccagtggtaccgcattttatagatgagatagctgaggctaggggagaaggatctggcccaagattgcatccttagccgctacacttataactctgtttccggcttgctttgacttttgggggagttctgttccttctgggttagcctgctgactcttaggcatggcaaacgccagtgatatttgtgaaggcctttaggatatttttttcttgtgggaaaacttgttggttattgcttaagaagtgcagtgtgtctggaagtgcagaacttggtatcctttagagaaaaaatattagtgaagaagccctggaggcccaggttgggagtcagtcgaggattcctcaagtaccatttgctaggctgtgaggtgccttagggcaggtctcttgtgccctgttctcttgtccccaccaccaacctatagcaggcaccaaagcaagtgcccggtaaataccaataagaaattaaggaaagaaacaaaccacgacacccaaatgccgtaatcttaaagaaaagcaaatgcagtcccagtcctctgaatgggtcagccccttagatggaggaggtgggacgtttgggcttgggggctcggcaaggcaagcaagacacaccagagctcttccctcgatgccagccattcatcgacagtcagcatgtcatccacaagtatttcctgccccgagcctatgctgtcgccatcccactggctgcaggcctyctgctgctcctgtttgtgggtaagtcatcacctcctccccttgaccctgggcagggtttcgggaagaccccacctctgaacatgcttccacactttggcggtgctggaagctgcttgccccgaactcacccgtggggttttcctgttcatccttcgaggctgccagtcagtaacctctgggtttcctggtgccccaggctttttggactccaatgacctgtctacctctttcctgccccaaccccatcatcactctgctcacacctcagtcaccctcttgtcaccctggcttctaattcctgcacctctctctctcatggcttcctagggatggggactgtgtctccatcattactgcacatctagaacaggctgtggcactgaggctgtgctcagaaagtcatttggatgagtcagtcaacagccgggtgcctggatgatgggtggatggatgggtgggtgggtgaggtgtaggaggaggtgggtaggtatgtaggtggacagacaagtggttgaccgggtgatcgatagatgggtggatcttgttccccttggaatctgaaacactaaatgcagcatcttgcttgaggcaggcactcagttggtgtttgttgagtgaatgtgagtagacatatgccttgacgaatgactagggagataagcaggttccctggaggatggttgggtaggttcacagccctgtgtgtgggtggctctgctgtgtcatgccctggcctcccagcagccctgagcttagatcttatgtggcctttctggtctgtgtatcccaggactgttcatctcctaygtgatgctgaagascaagagagtgaccaagaaggctcagtgaaggtcccgcagggatgaggctgccagccccttctctgcttcccctccagcacagggaccaagtgggggagcctgcagaacctgtccaggcacagtggctcctcaagcctgcctgtcctgcagagtccccatggcatggagcttacacctgactgactggagccccctccccgactcccacttccagaagctaggagggagggatacctggaagactccggtcacctccttcttgctcagggcctaaaagatgctggtcctcccaacctcactctcagactccctgccaccttttcccctgggttctgccgtcttgcctcacttcccctcctgtcacatgctgacgttggacttagcaggttctaaggccacatgtgtgacctctctgacttctcttcctccaccaaggcagctttccttaccctgacacagccccagaccccacaaagccttctggacctggaaagcctggggaaggactgacagaccccaggaccagccctggggctcagggcagccaccccgggccgctgaccgactgacctctcctcacggaggcccagccccaaagccccagggctggcccgtttgggacagctgaccaataaacactgatggtgtgtttgtctctgtgccgtgtttacccagggtcggggctggagcgggctgggagtggtcttgggtcaggagatcctgtacagtaggggtgactcgggggccttctgccctgaccctgtgcgctggggataaagcagggactgggacagatgtgcttcctacccaatggagctcacagctgggagtcattggaggccctggcacccctctgccatgcctcccctgtgccagcttggccgggttggatttattactttagggacccttgggccactcccctaaaaaccccacagcccaacttaacgtggccctgagcagtgaaggctgctctgtgttcaggttggctggactggcccagcccctagccttccagcagtcccaccgtgcctgggcagctggctctcccattttccacggcacctagtgtaaacccccattcctcaaacccggttccctcacttttcttccagttggtggaggtatcttcctcatcacagaggaaaaaggccaactgcagacacctgccctgtccccacctgctccatgctctgtcctccagtccaggcagaactgcccacttgggctttggatcctaaacccccaactactgtagtgggagcctgaggtcacagttggcgccccctgttgtgagaaagatctccatgggatcctcccattgttccctgagtgtgctctgggatcccacttacaggccctccgtcaatccagtagttcccactaagtatctccctctgtccatttcaccaccaagcttccccaaagggggtccgcatctgtctcctgcatttcttcacctcctgccgcactcagcatctgtccccatctctccaggcaggctgcagccactgaggccaccagcggtgtccactctttattttttttttttttaatttttctttgtgacaaagttttgctcttgttgcccaggctggagtgcaatggtgtgatctcagctcactgcaacctccacctcccgagttcaagtgattctcctgcctcagcctcccaagtagctgggattacaggcatgtgccaccacacccagctaattttgtatttttagtagagacggggtttctccatgttggtcaggctggtcttgaactctcgacctcaggctatctgcctgcctcggccccccaaagtcctgggattacaggcatgagccaccgtgcccagttgatgtccactctttaaatccaaaggatgtttgcttgactctcagctgcatttggcctgtgacatcccctgatccactgtcagccgctttcttgatgtctgtgatgaccattctgtttgtttgtttgtggcagagtttcgctctgttgcccaggctggagtgcggtggtgcgatcttggctcactgcaacctctgcctcctgggttcaagtgatcctcctgcttcagtctcccgagtagctgggattacaggcacctgccaccacgcccagctaattttttgtatttttagtagagatggggttttgccatgttggccaggctggtctcaaactcctgacctcaggtgatctgcctgcctcagcctcccaaagtgctggaattacaggcatgagccaccaagaccggctgtgatgatcattctgctatttgatgtctcactcatgccgtcttctgccatgtgatgctgggctcctcagggttgtgtcacaagccgtctcacccttgccaggctcacctctggcccgatgcactgcacatggcccagctgcccacctgacatcctcatcggatgccatggtgggaaactcaaatgcatcctctcatgagctgaattctcagacttctcccaaatctggctgttcccctcatgcccttccccctctagtgactggtgtaccatgtccctaacctggctttcttccttatccccccatccacaggaccctgagctttatcagttctccctccccttttctcctggcctctagccaccttcctgatgcaaagccaccatcctctgccctaagtcacagatggcttcctcactgcttctcctgcccactctggccccaccagtccaactatgcataacaaccagtgcccttcaaaaatgcacaccttgaccaggcacggtggctcacgcctgtaatcccagcactttgggaggccaaggtgggcagatcacttgaggtcaggagttggagaccagcctggccaacttggtgaaaccccgtctctactaaaaatacaaaaatggggccgggcgcggtggctcacgcctgtaatcccagcactttgggaggctgaggcaggcggatcacaaggtcaggagctcgagaccatcctggctaacacggtgaaactccgtctctactaaaaaaaaatacaaaaaattagccgggcgtggtggcaggcgcctgtagtcccagctacttgggaggctgagtcaggagaatggcatgaacccgggaggtggagcttgcagtgagctgagatggtgccactgcactccagcctgggcgacagagcgagactccgtctcgaaaaaaaaaaaaaatacaaaaatggctgggcgcggtggctcatgcctgtaatcccagcactttgggaggctgaggtgggcggatcacaaggtcaggagatcaagaccatcctggccaacatggtgaaaccccggctctactaaaaatacaaaaattagctggatgtggtggcgaatgcctgtaatcctagctactcgggaagctgaggcaggagaattacttgaaccggggagtcagaggttgaactgagctgggatcatgccactgcactccagcctggcgacagagagagactgtctcaaaaaaaaaaaaaaaaaaaaagcccagcatggtagcacgcggctgtagccccagctactcaggaggctgaggcagaggaatctcttgaacctaggaggcggaggttgcagttagctaagaccgcgctactgcactccagcctgggcgacagagcaagactctgtctcagaaaaaaagaaaaaaaaaattagctgggcatggtgacgcctgcctataatcccagctacttgggaggctgaggcatgagaatcacttgaacccagaggcagaggttgcagtgagccgagattgcgccattgcactccagcgcgggccacagagggagattctgtcttaaaacaaacaaacaaaaccctcgaaccttggtgcctcacacacacacccatactcacagtacctctctgggtccccacagggccctgcctctcagcctgctttcccctcttcactccagccactctggcctttcacttcctggactcaccaaggccctttgcacgtcctactcgccttggtcccatagacactcatccggcacaggcttgtgccaggcactcagccaggaggcaggaatgacatggccccgctttcatggcattcccactccagggggagacgtgataaacaataaacaagacagtctctgacagtgttagggtggtaaagaaaataaaggtgatgtgatcaggagtggggggaggggagcgctctgttggagtctggcaaggtgacgaaagaacgaggcgagtagcagtctggggtcaagagtttcaagcagagggaatagcaaaatgcagaggcttgaatgggagagtttggcggctaaggaacaggaggggccgggcggctcagtggttaagtgtagggtgagtggtttgagatgggcctggggtcagggtgaggggtttgggttttgttccattgccatgggagccactggaggctttaagcacgagagtgacatcatccaagttatgcttttaaagatcacgcgggcagctgagcccctccctctcgctcaccactaaatccccagggcctagcactgctggcccacagtgggtgttcaatatctatgtgttcaatgaatggatgtccccgactttgctgtgtgacctagaggtagtgacttctttctctagatctctcagttttttcacccaaaagacgggcaatggggatttcacgccggaatgggtgggtggcacaggatttaggttactcgcctccccaggcggccctagcgacccgagtccccacgccgagggcggaaaatgggggtgctcccttcgagggaccccagccaatgtccggcggccccgccccagccggaccgaggtctgaaggatgctgcagccgtgggggcgggacccgcaggcgatcgccagcgcctcccgcgtggattggatgcagccgcagtcggcgccatgctattggtcggccgcgaggtaggggcggggcctgattcctgcagcggggcggcggggaatgcggccaaagcccgggaagctgctgcgggggcgatggctgcgccgagcccggggccccgcgaggtaggtgcggacccgagagaggacaggagagggaagggttggtgggcaggggccgggcctcccctcggcgagcggcgcggacacgcccccatccaagcctgggaggggccctgcagccggcgaagaccaggacacgccccacacggggcgccaggtatcccgaggggcggcctggcggatatccctcaacacttcctcagctttctcattgggaaaatggagaggatgctaaagctcctccttcagggagctgttaggaggtcaagctctcatccagtgcggggcacgcggtggatgcccactactggtgggtcagcggctatgaaaagcatcgtgctggcccctccgtgctggcctggaggcgctcagcataggcgaatggaatagatgtgactgaatcaccggcatcacagctcctactatcaagggctcccgtgcaaggagctcaaactcaaaagtaacaagagttcatacctaccacgaagaagctgttctagttttcacgttgcagatgaaaaaatgaggcacagaaaggttaggtgacttacctaaggtcacaaggttggtgagagacggtccatctaaggccaggtttgactgcagagtgcacgccctatctactgataatcataaccattgctctattcgggtgctgactgcgtgccaggcactgtgtggcccctctgggtaccagcatcatctctattttacagctgaagaaattgaggcagagagagatgaggggaagtctcacaagtagtggaagtgggacttgaaccctgatctttttcctctgtgacgctgccacaggctgtgtcctgtgcctcctcccaccaggtcctggccccctcccctgaggctggatgcagagcagtcacctccagccggcgggggcttctctggcgcctccgagacaagcagtctcgcctgggcctgtttgagatcagcccggggcatgaactgcatgggatgacgtgcatgatgcaggcagggctgtgggctgccacccaggtctccatggaccacccacccacggtgagtggcccatctgtcccacgaatctccacaccagcaatggcaagacttggctgatgccctgtctggctgaaactgcaggtgtggggatcagagagggatatcaaggggaggaaggcagagagggaggaacattgtggtgtgggagctggaacgtctggggtgcgttgggggtgtgaggaaccccctgactcaggtggttgctgtgtgactctaggtgggtctctgcctctctctgggcctcagtgtccccatctgtataatggggggagattatactccttggtttctgaggccctcccagccctgccagggtgtatggttgaaaagggacccccacccccaccctgctggcctagcccatcctctctggagctcaggctgaggcagggctggctcagcagaaaggtggcccaactgcaagctcagcagctgggcgggcctgggtgagcatgtgtgtggtgttcgtgtgtgtgcctgtgtgcgcagtgggaccacattccacagaccacatccgggcacagggacctggagatccagggaaagtgtagagactcgagggagttctctaaatcacaaactgacctcatcaccty

SEQ ID NO: 94225 - DNA, 17116 bp, Homo sapiens
gccgagattgcgccattgcactccagcgcgggccacagagggagattctgtcttaaaacaaacaaacaaaaccctcgaaccttggtgcctcacacacacacccatactcacagtacctctctgggtccccacagggccctgcctctcagcctgctttcccctcttcactccagccactctggcctttcacttcctggactcaccaaggccctttgcacgtcctactcgccttggtcccatagacactcatccggcacaggcttgtgccaggcactcagccaggaggcaggaatgacatggccccgctttcatggcattcccactccagggggagacgtgataaacaataaacaagacagtctctgacagtgttagggtggtaaagaaaataaaggtgatgtgatcaggagtggggggaggggagcgctctgttggagtctggcaaggtgacgaaagaacgaggcgagtagcagtctggggtcaagagtttcaagcagagggaatagcaaaatgcagaggcttgaatgggagagtttggcggctaaggaacaggaggggccgggcggctcagtggttaagtgtagggtgagtggtttgagatgggcctggggtcagggtgaggggtttgggttttgttccattgccatgggagccactggaggctttaagcacgagagtgacatcatccaagttatgcttttaaagatcacgcgggcagctgagcccctccctctcgctcaccactaaatccccagggcctagcactgctggcccacagtgggtgttcaatatctatgtgttcaatgaatggatgtccccgactttgctgtgtgacctagaggtagtgacttctttctctagatctctcagttttttcacccaaaagacgggcaatggggatttcacgccggaatgggtgggtggcacaggatttaggttactcgcctccccaggcggccctagcgacccgagtccccacgccgagggcggaaaatgggggtgctcccttcgagggaccccagccaatgtccggcggccccgccccagccggaccgaggtctgaaggatgctgcagccgtgggggcgggacccgcaggcgatcgccagcgcctcccgcgtggattggatgcagccgcagtcggcgccatgctattggtcggccgcgaggtaggggcggggcctgattcctgcagcggggcggyggggaatgcggccaaagcccgggaagctgctgcgggggcgatggctgcgccgagcccggggccccgcgaggtaggtgcggacccgagagaggacaggagagggaagggttggtgggcaggggccgggcctcccctcggcgagcggcgcggacacgcccccatccaagcctgggaggggccctgcagccggcgaagaccaggacacgccccacacggggcgccaggtatcccgaggggcggcctggcggatatccctcaacacttcctcagctttctcattgggaaaatggagaggatgctaaagctcctccttcagggagctgttaggaggtcaagctctcatccagtgcggggcacgcggtggatgcccactactggtgggtcagcggctatgaaaagcatcgtgctggcccctccgtgctggcctggaggcgctcagcataggcgaatggaatagatgtgactgaatcaccggcatcacagctcctactatcaagggctcccgtgcaaggagctcaaactcaaaagtaacaagagttcatacctaccacgaagaagctgttctagttttcacgttgcagatgaaaaaatgaggcacagaaaggttaggtgacttacctaaggtcacaaggttggtgagagacggtccatctaaggccaggtttgactgcagagtgcacgccctatctactgataatcataaccattgctctattcgggtgctgactgcgtgccaggcactgtgtggcccctctgggtaccagcatcatctctattttacagctgaagaaattgaggcagagagagatgaggggaagtctcacaagtagtggaagtgggacttgaaccctgatctttttcctctgtgacgctgccacaggctgtgtcctgtgcctcctcccaccaggtcctggccccctcccctgaggctggatgcagagcagtcacctccagccggcgggggcttctctggcgcctccgagacaagcagtctcgcctgggcctgtttgagatcagcccggggcatgaactgcatgggatgacgtgcatgatgcaggcagggctgtgggctgccacccaggtctccatggaccacccacccacggtgagtggcccatctgtcccacgaatctccacaccagcaatggcaagacttggctgatgccctgtctggctgaaactgcaggtgtggggatcagagagggatatcaaggggaggaaggcagagagggaggaacattgtggtgtgggagctggaacgtctggggtgcgttgggggtgtgaggaaccccctgactcaggtggttgctgtgtgactctaggtgggtctctgcctctctctgggcctcagtgtccccatctgtataatggggggagattatactccttggtttctgaggccctcccagccctgccagggtgtatggttgaaaagggacccccacccccaccctgctggcctagcccatcctctctggagctcaggctgaggcagggctggctcagcagaaaggtggcccaactgcaagctcagcagctgggcgggcctgggtgagcatgtgtgtggtgttcgtgtgtgtgcctgtgtgcgcagtgggaccacattccacagaccacatccgggcacagggacctggagatccagggaaagtgtagagactcgagggagttctctaaatcacaaactgacctcatcacctgctgaaaagcttccatggctccccaatactcagcatgacctccagatccagctgcatccagccttgttcacactccatccctccctcactggcttcagccacttgggccctccttcccttgccggcagccaccagtgctgtttctactggtgcgagcaccctgctcctcctctccactaccctttagatttcagcttagaggtctccacccccaggaaggcttctctgattttgcccctcccaggttgcatcaggcaggtcccttggcttcagggccacccccttgtactggacagaatctggcttcacttggccagcctgtgagtctgggaacgtgcctggcttgaactcatggcctggtgctggtgatccagagtggatgagatacactcaggccttgccgtgggtcactcttgtccccctggcatccctgggaggtgagcaatgcatctgcccaactcaggcactctcagaaactccggtcccggtttgctgaaggaatccaattggaggaggtgggggacgggccaggtgcaggacatctggagatcctggggcaggcagcaggggactgagggttgccctgagctcctctacctctccctgcaggggccgccctcccgggacgatttctcggaggtcctaacccaggttcacgaggtaggaggcccagactcccgtgtgggagggacgtgtgctggtcttgctctctcctctgcagttttcccatctgtgcagtgggagtgaaggcttgtccctgagacttgagccttgcaggaagggtgtggtcaccctgaccctcctgtcccaggaccaactgcacacacccgggcccacgcagacactccagaggaggctcttcctcccctgcagggcttcgagctgggcacgctggccggccccgcctttgcctggctgcgccgctccctgggcctggcggaggaggactatcaggctgcsctgggccccggcggcccctacctgcagttcctcagcacctccaagagcaaggccagcttcttcctgtcgtgagcttgcggcaggggtggggcaggggtgggagtggtacccctggctgggagggcagaattcccagtggcggggaaggccccctgaagagagaaacagagcggccctaatctgggagggtcagggccggatggtggacagatcggggaggagaggagggcgagggccgaaggcgagagaggcggtgccgagacctgggagcgagatccacgtgcacaggtcggggaagggggccgggtgggagccgctccagccaggcctgggcagtgacctctttctcttgccccccagccacgaccagcgcttcttcctgaagacccaggggcgccgagaggtgcaggctctgctcgcccacctgccccgctacgtgcagcacctgcagcggcacccgcactcgctgctggcgcggttgctgggtacttggctgggggcggggctcggtgggggcgggtcctaggtcatcatatacctggggagggcggggtatgtgggcggggcccaaatgggcggatttggggttgtagggcatgggggtggggccatacgtgggggcggggcaccactggggctgtgtttaggggtgggatcgggtcgggatccggaccagccaaggaagggtccaggtgccgcggatcttgagaaggaggcgtggcctggcgctgggattggcgccggatgcaccccgggttgtggagtttggggatcctcatccggcgccctctccccttccaggagtgcacagtctgcgggtggaccggggaaagaaggtgggtgaagccgaggcgaggtggctgggcggagcgggcggctggagggcgacagccggcctccctcactccctgtcccggcccccagacgtacttcatcgtcatgcagagcgtcttctaccccgccggccgcatctccgagaggtgagtggcctaagcaggtttgggcccccatcccagccgaaactcgcggcccgaagcacccacactcactagccagacggtgaaaccgaggcccaggaaggagaaggggcgttcccaagatctggtgggtcagagacagtgacgcccacacccagcatctctggagcactcagtgtgcgttaggcgccgtgttgggcccttcgcatgctttttaattcccagaaggacgctgaggggcagctcttatcctccttcctagatgagaaaccgaggaaggagaaggccacacagctaacatgtggggagcagggactcagacccagcctctgactgcacgtaaccccctgtgccctccagcgctgactctacccacaggttccccgccccccggccattggctgtccccaagccgtcctgttgccaccgcctggggttggatccctgtgtctgggacaccctcaggggtgacaaggtgtccagaggcaggcacaggcagggctcaagcctgggctgggccaccagtggcctgagtgtgaatgcctgctctgctcttatctttaactcagaaacaataataggccggggttcagctatagggccgggcatggtgcgtcacgcttgtaatcacagcacttttggaggccaaggcaggaggattacttgagcccaggagttggagaccaccctgggcaatagagtgagaccctgcctctacaaaaaatgaaaaagttagctgggtgtgatggcacgtgcctgtagtcccagctacttgggaggttaaggtgggaggattgcctgagcccaggaggtcaaggcttcagtgagccgtgtttgtttcactgcactccagcctgggtgacagagtaagaccttctctaaaaaaagaaagaaacaggtgagactccatctccaaaaaaaaaaaaaaagggaagaaagaaggggaggaaggaagggaaagaaagagagaagagagagaaagaaagaaaagagagagagaaagaaagaaaagagagaaagaaagaaagaaagagaaaaagacaggccagggttgtgctgaggactggggatgatctctgtaatagttcagtgcacataagtagtcactggaagctcttgtgagattctctctgtgtctcaaatctatgtaaagctgaattctgtccccccacccaggtatgacatcaaaggctgcgaggtgagccgctgggtggatcccgcccctgagggcagcccccttgttctggtgctgaaggacctcaactttcagggcaagaccatcaacctgggtgagccacgggggtggccactgcctgttcctccttcattcagggtgaagtttagaagggtgtccctgctgccctctgcctgagttattaagagcccagattcggccgggcgccgtggctcacgcctgtaattccagcactttgggaggccgagacaggtggattacgaggtcaggagttcaagaccagcctggccaagatgctgaaactctgtctctacgaaaaacacacaaattagccaggcgtggtggtacccgcctataatcccagctactcaggaggctgaggcaggagaatcgcttgaacccaggcggcagaggttgcagtgagccgagatggcgccactgcactccagcctgtgcgacagagcaagactctgtctcaaaaaataaaataaaaataaaagagattctggaatcaggcagagcagagttcaaattcaggctccatgacttcctagctaagtgaccaaggcaaattacagatgagtttctttatttgtgagatggggacagtaatgccacatgctgtcacggggcagagtgtgtggagcaccgtggctggcacatgatgagcgctcaggtgggggcactgatgctccggcagggccccagcggagctggttcctccgccagatggaactggataccaccttcctccgggagctcaacgtgytggattacagcctcctgatagccttccaacgtctccacgaggatgagaggggcccgggcagcagcctcatcttccgcacggccaggtgagcctcccacaggggcaacagcgagattgaggtggtgagagtaagggaaagacagacatgggggcatgggagtgcaccgggagcagtgcagccaaagacatgaaggctggaaagtgcagagtttgtgtgtgtgtgtgcgtgtgcgcgcgtgtgtgcatatgtgtgagtgcatgcatgcgtgtgtgtgcgtgcatgtgtgtgggtgtgcatgtgtgcgtgtgtgtgtgtgtagaggggagggctggagaagcctggctggtagggcaggaggggcacaggtggactgcagcaggggacagaacagatgaagtccagttggagaagagctttggtgactatttgaagaatctgcccattttccagtggggctgtggaaccactgaaggtttcagagcagagaaaaagacctatttaatttttaacatttttgctttttttttttttttttgagatggagtttcgccctgtcacccaggctggaatgcagtggtgccctctcggctcactgcaacctctgcctccccgattcaagcgattctcctgcctcatcctcctgagtagctgggattacaggcatccccaccatgcctggctaatttttttttttttttttgagatggagtcttactctgtagcccaggctggagtacagtggcgcgatcttggctcactacaacctccgcctctcgggttcaagcagttcttcctgcctcagcctcctgagtagctgggattacaggcacacaccagcatgcccggctaatttttgtatttttattagagacggggtttcatcaagttggccacgctggtcttgaactcctgacctcaagcgatccacccgcctcggcctcccaaagtgctgggaggcccagcatccggccaattttcgtatttttagtggagatggggtttcgccatgttgaccaggctggtcttgaactcctgaccaagagatttgtctgtctctgcctcccaaagtgttgggattacaggcgtgagccaccgcgcccagcctaatttttgctttagaaagggtccttgccctttttagctggtcattccacttccaggacgctgacgtcatcatcattggcaccgtcttcctgtcttcatctcagtagtggtaactgtcattccttcatgctgactgggagcctccctgggagggtagactcatccccatttgagaaatgtgagaactgaggctcgggaagcagacacaaggttgcagaatgacttctgaggactcatgttagtacttggccagctacttccatttcagttccctcaggcccacccctgtggtcgaacagaattacataggagctaagacaggcactccattgatccagtgggtggacaaggggagtgaaagaggaggtccagccgccacccctcctgtcccctgcctcgttcctacccctcagaggaagaacttggtatgggtgagacttgggtagaatttggagtcactggcctttggctgggctggacacgtcctgaccggatggtggcaagcctgccatggggcacggagcctcccacacctgcccatccaagtgaggtcagcttttcccttgccctctccccctagctggtacttaggccaccgctgtcattcagtcagtgagtcctggtttgcatggaattgttgtgacattgaaatattttcatgttggctgtcccagccccaccccaacccagttcccagcccctactgagaacgcccccatcccacatctccccatcatccaggtagcccacagggtaccagcattctgttcagactctcagaccactgagctctgattggccagcgccgggcagggcttttttctcattggtctatttaccccgagacccagacaggacaggattaaagcccttcaatgacgcctgaggacaaagttagggaattgaacctgcttctgctgggactgggcgccctgccaaaggtaccttctggtatggaagacattttgaggcaaaaccatagacacaccatctgcaaactggggttgctggattttgttcacaaaacttctgcttcacaaccctgagacttctggggttggatgactccaaagagaaatttaggaaatagacttacctgaagtcatgtggcaccaaggtgcagattccagggtctgtgtgacgcaaaagctatagaccagtgctacccagtagaaatataattcaagccatacatgtaatttaaaattttctagtagcctcattttaaaaagtaaaaacaggtgaaatactataattcatttactcaatacatccaaaatgttcatttcattgaatcaacgtaaaaatgagtaagatattttacatcctttttttcttttctttcttttcttttcttttttctttttcttttttctttttttttttttttttttgagacagagtctagctctgttgcccaggctggagtacaatggcaagatattggctcactgcaaccctccgcctcccgggttcaagcgattctcctgcctcagcctcctgagcagctgggattacaggcgtccgccaccacacctggctagttaattttttcattttagtagagatggggtttcgccatgtcatggtctccgacttctgacctcaggtgatccgcccgcctcggcctcccaaagtgctgggattacaggcgtgagccactgcgcccagccttacatcctttttttcatcctgtctttgaaattgagtatgtattgtacacgtatagcacatctcaactaggaatagccacatttcaaggctcagtggccacctgtggccaatgtctactgaacagtgcacctctagcccaacactttcacttttctcagtctacctgacttcacaaacctgggcacacaggaggtgtgggaatgagctggtggaggggtgggcagcctggccaggcttgcagagccgactggctggggcttcctggaggagctggcagcttcaccctcctgtcggcccccaggtctgtgcaaggggcacagagcccggaagagtcgagagcccaaaaccgccggctgctgcccgacgcccccaacgccctacacatcctggacgggcccgagcagcgctatttcctgggcgtcgtggatctcgccacagtctacgggctccgcaagcggctggagcacctgtggaagacactgcgctacccaggccggaccttctccactgtcagcccggctcgctacgcccgtcgcctctgccagtgggtggaggcgcacacggagtgacgggcgcccggccccactctccggatctggacgatgggctcacgccaggaacgccggttcccccgggcccgggcatctcgcctgcgcttcctcctgatggtcgccagagggcagcatcccctaactaataccgtaaccgcgcagtcccgtttgacggtggtgccgtgcccagcatcgtgccaaggactcccctactttagctcatttaatcctcaaaaaatgctattattctctttttacagaccatgaaatggaggctcagggggtgaagggactgatcaagatcattcagcaataaatgctggaaccaggactcaaccatggcttttggattccggagcctgtattcttaaccaccagctcctgcagcttggtcctcatgatctgggcaaggggggaggctgaaggctgcagccctcttgtcatccagatggggaaactgaggcccagagactttaaggggcgtaagcacgggtaagtggcaaggtcggccctgagtacccaggcctcccggccccctgctcctggcctgatactctagggatgcaggtgggagaagcaggggtcctgggggctgcctggagctctgggaggcattctgaacggggtctactactgatctcaggtgagctctgccctcctctgaaagtcacttttctcatcagttaaatgggggcaagggtccgtggtccgaccaaggtcttggcttcacagacatcaccaggagcctgcatgcccctgatcactccttctccttcctccaggaaactccagcctggcctctgaccccagttcaatccgaccatgcccaagcccaagcgggcctttcctccagaactgctccggggcctggctgtgtgactggagcaaggtgctaaacctctctgtgcctcgctggtctaatctgtaaaatgaaggaatggaaacagacctcattaactcattaaatatttgttgagcacctgccatgtgacaggccctctgctggtaatggggacctggggatgaagcaagtggcacagattctgccttcatggaactcgtggaactcacagtctgggggaagggacccctacccgatcatttgatggatagtgttgggggaagagctttaacttctactctgagaccagagaagagtctgacacgtccctaggagggtcccaggctaagagcacagcaagggcctggggtgagagaaggaaaacatttcagagtgggagggggccatgtgggccaagagtggacccccaggattggacagtgcaggacctcggggaagccattcagctgcaatgcacactgccactccactgacctatcagatcccaccaaagaaagatggctgaggggccgggcacgttggcttacgcctgtaatcccagcactttgggaggccaaggtgggtggatcacttgaggtcaggagtttgaaaccagccgggccaacatggtgaaacctcgtctctactaaaaatagaaaagttagccagctgtggtggcgggtgcctgtagtcccagctacttgggaggctgaggcaggcgaatttcttgagtccaggaggcagaggttgcagtgagccgagatggcaccactgcactccagcctgggcaacacagcaagactgtctcaaacaaaacaaaacaacaacaaaaaaagaaagatggctgagggggaagggggaggaaggagagagctctggatgcagggttcctggaatatttggtttttggttttttttgagacagggcctccctctgtcacctaggcgtgagtgcagtgacatggattacagctccttgcagcctcaacctcctgggctcaagtgatcctcccacctcagcctcccaagtagcggggactacaagcatgtgccatcacacctggctacttttattttattttattttattttattttattttattttattttgcagagacagggtctcatcatattgcccaggctgatcttgaactcctgggctccagcaatccgcctgatttgatcttcccaaagtgttgggcccacaggcatgagccactgcacctcaccagaatatatgtactttaaatattgatatcactcctagtcgtctgggtgaccttgcctgatttctcaacctctctgtgctggcatgagctgagtggaaatttcttgtccttactttagcaggaagttgtgacatagagtgttgtcacgcccatcactcaggaggtgatgggccagtgaagctcggaggtggcagggaattgcagcaggaactggagtctgactccacatttccacccatctggatcccacagggctgagtcagcgccacagagtcctgctctcacacataaggatgactcagactctctccacctttgggtctctggccgtgagcctagccgggacctcaggctggaaaggaaagtgatttgtccaagaactcatgggacccaggctctcctaactcatgcattgatagacgtgacctagcacctagtgtgtgccgggcactgtgcaggtgctggaggtgtcctgagcacatggctggtctgactttgcccacatggagcttagagtctgtggggcaggtggaccataaataaggcaaccagttaatacacagggcaatttcagagtgtgacaaatattatgaaaaactgagtcggggtgaggcaagagggattggggtgcagcgttgggtagggtggctggcaagggcttttcagaggaggtgatgcttgagctgaatggtaagagaagccaccatatgactagcgcagtccagcagaggacacagtgagggcagaggccctgcagtaggaatggcttcagtaatgattggcggtcggagggtggccagggcaggtggagggtgactgaaggagttcacactgtgtaggatcgtgtaggttgtggtaagcagagtaggtttttgccaaaagcaaagtgaagatctttatctggggctgtgggacttcctggtcacagttctactgtggacttatgatcctcatctaccctgggagcacgggccatttgggcatgtccctgtctccatgtggccctagcaaggatggagttgcctctccggggaaggaatcatcacctcaccagccattgtgggcagtgagtgaatccatagggaacttctcaccattgtgccctcagggttgggcctatgaggaaagaaacttgaagaacgaggactgagaggaaagggctctggctttggggacccactgccttgtgtgagtgaggggccatggtgactgagcgtgaaccactactccccatgtgtgtccaggctggagtggcagtgacaggagagtttgtgctcaaaggaggcccctagggggcagggccactacagcagccctcctcccagcccctggataggggaggcactgaggcctagagcaccaggcccaggggtgatttggctttgaacctggagcagggtagactgggaaggttgctgagctggggacagataccctggcatcctgcccaggcctgagcctctgagaaaaaggaaaaaggagtttgaaatggagaccagggcaggagcccaagctggttcccaggctagctccctgcagaggaggtgggtgtggttgggatggtgaaatgatctttctggccaattcaacattttgcacaaaaaatcataaacaagggctgggcgtggtggctcacgcctgtaatcctagcactttgggaggccgaggcaggcaggtcacttgaggttaggagttcgataccagcctggccaacatggtgaaaccctgtctctactaaaaatacaaaagttagctgaaaatcgcttgaacccaggaggcggaggttgcagtgagccaggatggcaccactgcactccagcctaggcaacagagagagactctgtctcaaaagaaaaaaaaaaaaaatcctagacaggaagtgtgccctctcacttccccataggcccacccctgctactgtcccagtgctttctgccaccagcctggcgcttgaaggcagttgcctctgagatcccaagggaccccaataggacacactgcagcatctgcctggggcctgagctgacttgacttggatttggaggacattccagcgagggagccttcgagaggtaagagtaggtggtcacagccccgggtctggagtgaaacttcctgggttcgaatcctggctgtgacaggagctgcctctacacgtgtgtctcagaggagaaaaacagactcaggtgactgtcacactgacataatcataataaaataatcatattgaaaataactcatgtattcgttgtttatctgaatttccaatgtcactgggcgttctgtatcttacttgataaatgcagcaatcctaccagttgaaacgtgggctgcctgacccgaagccctgcttaatttccctccccaaccaccatttcagaaatggagacactcaagtccggacagccaggccgccactgcctggtggcccccgacaccctctaggtctctttcccctgcggcccgacagcctcgcccaggcaggagcctgctggaaattcggcaggaccgaaaagggagatgctggtactcagactccgccccggctctgaagccccgcccccggccctgaggccccgcccctagctggaggcctcgccgccagccattcacgtcccgccccgtcccggccgcgcagagccctccccaggtcgcgcaggccgcgctcgtaggatccgcctgcggcgcgcaggccccgcccccggcgcgcgagtctccgcccctcctcgccggccccggccccggccccgccccctgcctctggccgcgcggatcagcttccagcccagtcggcccggcccgggggccatggagctccgagcggcggatcgcgagcctcctgcgaaccccagcctgcacgcccggttagcattcggccgggagatgcggcagtggaatctggaagggcggtgaaaaacctacgtcctgccctcgcccggcctctccattcgtcccccgggtagagaggtaggatggatggggtggaattccgggcttctggctctctctgccccagacctgatgggtgaccttgagctgggggcgcctcctcgctgcctcttcctccccatctgcgcactgggaattgggttggcaggaggtctcgcaaacgtcgctgattcctgctcctttaggatggggacattgccttccggtgtttggagacgtcaaggggttggattcccgggtgccatgtgctttcaccccggcctgtaccctctcctgcctcagttttccctatagcttagaaccccacctgccttacccctcccggctctgagtttctgggtcttggcaggtgcccggctcccaccccttcccagccccagccctggagacagcagcccctagactactgagggacagcgacagcatgaaggctccggtaagtgggaagaaggaggacttccagggaacgcagaggccccgactggcggagcagctcagcagcctctccaccccaggacccactgccacttctgacctccctactgctgagcagagaagggcagaatggcctcaaagtccaaccctgttcttgcagaccgtgtggccccaggcaggtggcatccactctgcagtgtcagtaccttgctatccctgtaaaacggaggtaacgctacgagctcaccaggcaaagcctacgtggaactggggttgtgaagttcagttcagccgctcttgtctttactgcagaagccccgggctgtgagagagagagctggatgtggggggcagttcatctcgactgcctgagtcaaggtctctggttcctcatgggcaggggagcaggtgccaggcagaactccctcccctgcacagctggccacacagaaaagacttatttttagaagctgacgtagcttgcgggcagaaaatggtgggcctcaggcaggatgcgccggggcaggtggggtgatggggtagggggtgggggccactttcccacttctgatttttggagagcaccagccaactgcttggtggcttctgaagggtggcctagggacttgtgcctcgagtctagaaacctggagcccagagagacacacgtggtgaccagggtggcccactacccagtgactagcccacagttctgctgccaccaagcccttcccctcctgggaggcttggtggtggtaggggcattcactaagtctgccagcaggaccagccccaggctgggtctaggccagatggctagaagagcttcctggttccaatggcctttggcacatggtttctggaggcggtagcctccaggcaccagcttttcaattattaaaaccatttcttgagtgacctttgctccaatctccttgtgccacctggcctgctgacccagatccggatcaccaggggacagccactgagtcagctgggggtggggaggaggcggggccacactaggcagccctggtcctaggctgaaggggctggtggcccttctgaggcaccactttcccgttgtcatgtgcacagcactttacagtatacagaaggctttcactgcccccctcccgtaagttcacacggtgggcattatcagtccccagtttgtagaggaggaaacaggcccagagggatggagagccataggtcgcacagtacaccctagcctccagttaggaatatgggctttccagccagtatttaaggccccactgtgctgcttctttgctgtatggccttgtactacacacttcactccaaactgctttccttatctagaatgtggggatgataacagtgttatctccggggccttatgtgcccagagcttggcatccccaggtaaggcccagtggatggagactggattctgctgctgttctaggagctgctctagacccaggagcttctctagacccaggaggccaggtgcagcgctgaaggggcttctgggagccc

SEQ ID NO: 94226 - DNA, 31331 bp, Homo sapiens
  misc_feature (1)...(31331): n = A,T,C or G
tgttgttgtttttgagacggagtctcactctgtcgcccaggctggagtgcagtggtgcaatcctggctcactgcaagctccgcgccccgggttcactccattctcctgcctcagcctcccaagtagctgggactacaggcgcctgccaccacgcctggctaattttttgtatttttagtagagacggggtttcaccatgttagccaggatggtctcgatctcctgacctcgtgatccgtctgccttggcctcccaaagtgctgggattacagacgtgagccactgcgcccggccatttttttttttttttttaatagtcagggcctccctctgttgcccaggctggagtacaatggtacaatcatagctcacttcagtcttaagctcctgggctcaagagatcttccccacttagcctcctgagtagctgggactacgggcatgcaccactatagccggctactttttaaactttttgtagagacagggtctcactaggttgcccaggttggtcttgaacccctggcctcaagtgatcctcctgcctccgcctcccaaagtgctgggattacaggtatgagccactgtacctggctttaataagatattttttcttttttttgtgtgacagagtcttgctctgtcgccaggctggagtgcagtggcacgatctcagctcaatgaaccctgcctcccgggttcaagtgattctcctgcctcagcctcctgagtagctaggattacaggtgtgtaccaccatgcccagctaatttttttttttttttttttttttgtatttttagtagaaacagggtttcgctatgttggccaggctggtctcaaattcctgacctcaaatgatctgcctgccttggcctcccaaagtgctgggattacaggcatgagccaccgtgcccagccaagagggacaaaaaccttttcacagaaaaacatttttatacaacttaaccagaaagcttcatttcaggttcaggaagtggaaggggcaaaatcctggattttcacaaatttccaaaatgggcttatataactctccacccttttctttctttttttttttcttttagagacagggtctcattctgctgcccaggctgaagtgcagtggtgcaattatagctcactgtacccttgaactcctgggctcaagggatccccccatctcagcctcttaaagtgctgggattacaggtgtcagccactgctcctggctcgccaccaatgcttttcattctgatcatttctgtagtgagcagcatagaagaaataatgccttttgagggacagttgcatttaacagacagccttactaaggtgagtacgtcaggacaaagatgcgggaaggagaatcaggctattagtccattgttgcaaattgcaacgaattgagaaagtcagacacaacgatcaactgcagtgaaacatttggtggggagttttgagagtccagtctgaaggagtgcgtggaaggatcacggtccctgtgatgtaccctctctcggcttgttgctttgggcaggaatcacaagttaggaaggaatcagcaccagaaatgcagagctggctgggcgcagtggctcacgcctgtaatcccagcactttgggaggccgaggcgggaagatcacctgaggccaagagttcgagatcagcctcgccaacatggcgaagccctgtctctgataaaaaatacaaaaattagcttggtgtggtggcgcatgcctgtagtcttaactacttgggagactgaggcgggagaatcacttgaacctaggaggcggaggttgcagtgagcagagatcacgccattgcacttcagcttgggagacatcccaagaccatcttaaaaaaaaaaaaaggagggggggtgccgggcgcggtggctcacgcctataatcccggcactttgggaggccaaggcgagcgaatcacgaggtcaggagattgagaccatcctggctaacacggtgaaacctcatctctactaaaaatacaaaacattagctgagccaggtggcaggtgcctgtattcccagctactccggaggctgaggcaggagaatggcgtgaaccttggaggtggagcttgcagtgagccgagattgcaccattgcactccagcctaaaaaaaaaaaaaaaaaaaaaaaaagcttgcattgagccgagatgccaagatcacgccactgcactccagcctgggccacagagggagactctgtctcaaaaaaaaaaaaaaaaaaaaaaaaaaaggccgagagcggtggctcacgcctgtaatcccagcactttgggaggccgaggtgggcagatcacctgaggtcaggagttcgagacatgcctgaccaacatggtgaaaccccatctctactaaaaatacaaaattagctgggcgtggtggcacatgcctgtaatccctgctacttgggatgctgagacaggagaatcgattgaacctgggaggcggaggttgtaataagccgagatcgcaccattgcactccagcctgggcagcaagagcgagactccgtctcaaaaaaaaaaaaaaaagaaatgcagagctgaagagcagcccaatgtaaatggtcccattagagaggaactctttcatcatggacatctgtaagtgacccacactgtccagcagcatccacgatgtttgcacagcatatggccccagggagggatgtctctaatctgccagggtcctagagttaaagtcctgtgtgttgagtggagcaattttgcccatttttttagtttggcagaattcatgctgacactgaaacagctcacagcagacagcatcaggtttcagcatttttttttctctttttttaagacagggtctcactctgtcaccgaggctggagtgcagtggtgcgatcatagctcattgcagcctcgacctcttgggctcaagcaaccgtccccttgcagagctttcagcttgggatcaggtttggaaaactagaattcgtgaattcaggattttcttctgcagtagctaagccaagagactgtttgtctcgaggctaagagcgaagcgaggctttcttaagccctttaagtctgtcagtttcagagcccgggtggacgcctgtaaaaagatccctatcagctagaaaatcatgactctaagggtcagctgtgtggtttcacaagggctcattagcaactaaaaactgctttttaaaaccctgaaagtgtatctccatttagagattgcctctttttcatgtttttttccagaagctgtaatattagcaaacactatagtaagaactatcagtaactgagacttgttccattttatttacttacttacttacttatttctttattttgagacagggtctcattctgtcgcccaggctggagcgcagtggcacaatctcgcattgcaacctccacctcctgggttcaagtgattctcctgcctcagcctcccaagtagctgggtgggattacaggcacacaccaccacacccagctaattttttttttttttttgagacagagtcttactctgttgctcaggctggagtgcagtggcatgatctcggctcactgcaacctccacctcctgggttcaagcaattctcctgtctcagcctcccaagtagatgggactacaggtgcctgccaccatgcccagctaatttttgtatttttagtagagacggtgtttcaccatattggtcaggctggtctcaaactcctgacctcaggtgacccacccgcctcagcctcctaaagtgctaggattataggcatgagccactgcatccaggctaatttttgtatttttagtagagatagggtttcaccatgttggccaggctggtctcgaacacctaacctcaagtgatcctccctcctcggcctcccaaagtgctaggattacaggtgtgagccactgggccctgccttatctatttttgatacaagttctcaccctgttccccaggctagagtgcagtggcgtgatcatagctcactgcaacctttaactcctggactcaagtgatcctcccacctcagcctcctgagtggctggggactacaggtgctcactaccaggcccagctaggtgaatgcttttctgcacaccagggtattttcaaggatgcgtcctatgaacccatctgatcagtgagcttcttgagcaaggcctctggaacccacctctgcatggtcgggcatgaagaacagagacagtcacacccagccactgctgatctgttatccagtggagcccagcctgaacagagagcatcagggaggggactctggatactgggccctgcaggcttgcctccctgctctctgcccagacatgtgaatggcatctaggggtgcacccagcatgggactgagacctacagtgttggggacagagttcctacctctagatgcctgccagcctttgcaacccactgctgttgacacacttccttgagttagtaaacattggcctttgtgcttagcatataagccagggcaggctccaggagtgggggtttgagttggccacagcaatcaaagtgacaagatgttcctgctggcctggaggggataggcaggctacacagagctcttctcctccatgggaaccttctgggcctgtgagatccaccctgggccacctccactcaagttttcccagttggatatttatttatttatttgagatggagtctcactctgtcacccaggctggagggcagtggcatgatcactgctcactgcaatctctgcctccttggttcaagtgatcctcctgcctcagtcccctgagtagctgggactacagacgtgcaccaccgtgcccagctaatgtttgtatttttagtagagatgaggttttaccatgttgccaggctggtctcaaactcctggcctcaagtgatcctccctccttggcctcccaaagtgctgggattacaggcgtgagccaccrcccccggcccccagttggaaatttagacttaaggagctgaggtggacactgggggcacactgggcaggcccaggacaggcagaataagggggtgggaccaccttgcctgcctcctgaatggcccagaaaatagagaaaaggagggagaagtggtctgcactggtgcaatgagatccaacttcagaatcaaacaggccagagtttggggctctgctcttaccagttccatgacctgggagacatgtgttcacctctccaggcctcagtttccccatctgatggggatatcaatatctcccatttgtatagagggcaatctagcaatttaaagtgtgggtcctggagttagaatagcccggttcatgttccagttcttccctgccgcttgctgacctcatggcctaggaatgttctctgtcccaatgaattataaccaacactgagagtgtcctgtgtgccaggtcctgttccaaagagcgtgcttatctcctttaatccccaccacactattctcattcctgttttacaaatgaggctcaaagggatatggtgattttcccaagtcacactgtatgtaacagagccaggatgcaaaccttctcctgccgtgcctctcagagctatggaatacaacgctgtgacgcaaacaggactttggggccagtctccaaatgccccctcaaatttcctctaggcaagagttctggagccgccactgcactccagccggccttggcttctgagctttggattctgggcagtaatggtcacattcccagcgtcctggaaaagcttgcccttggcttctggccctgactctgcctcccactgactagtggacgtcactgcccctctctgggcctggcaacaccatcctgttcaatgaggctgcggctggatcagaggtccccaggcctggaaccttccagggctgggctcagctccccaccccatcccccaggtaggccaggaggcctgggcgggacctgcttggggttaaatactccggcccagcactccccaggcctctagtcccagtaggaggtttgactaagatcaatcatggtaagtgccatggccatctccccttgggtgggacatcttcagtaacgcttccagaagcaccttgtgttggaacctccaagtctcactgtccttctttttctccttagacgacttacagkgacaaaggggcaaaggtaagcaggcgaaatgtgggaaatgtaggggcctgagtctagaagggggtcggagtgcagggagactggggtttcagcagagagcagaagaggaaggactggagtggatacatgacgtgcatgcctgcacactcagctttacccccggggctccccgagactgagctggactcaacctcaccctcacaacaaacttgtatcctggccgggcatggtggctcatgcctgtaatcccagtgctttgggaggccaaggcaggcaaatacttgaggtcaggagttcgagaccagcctggtcaacatgaggaaaccccgtctctactaaaaatacgaaaattagccgggcatggtagcgcacccctgtaatcccagctactcaggaggctaaggtgggggagatcacttgaaccctaggatcgcttgaacctgggaggcggargttgcagtgagccaagattgcaccactgcactccactccagcctgggcaatagagcaaaactccatctcaraaacaaaaaccaaaacaaaacctgtaccccttctcaaatgcctgccaatcttttaatcccatctggaagttctttctaaggtctaacttaaatccatattgctgcaacataagtctatttccctgtgtgaaaccttggcaggcctcctgagggggtttccccatccaagacacccaggagctcaacttccacatgagaaacctcttttgaggcttggcaaggctgcatggggttccgctgctcctaagttctgtggttgaggctggaataaggagggtggctaggggacatcactccacccgcacttttctagactcactttcagggactcaacctcacctcttctctccttctgcagcctgagagaggccgattcctccacttccactctgtgaccttctgggttggcaacgccaagcaggtagaagccggggcaaggtgctggagtgagcagacggcagggcagagggctgcctgacaagggcaggcctccagcagggtctgtgattgscccttgggagggaggatcaggccaggggtgggccagatactctgaatcctaattacaccagcgggaaagttatctgtcagcaaaatgtgcaggcagcagtctatcttcccaggagggtctctgcccctgagrcaatagggcaggcaggctgaggggggccaggggctctcttgcggaagtcccccatgctggccccttgaccctcatgaaccctgctgcaaccctgtgwttcaggccrcgtcattctactgcagcaagatgggctttgaacctctagcctacaggggcctggagaccggttcccgggaggtggtcagccatgtaatcaaacaagggaaggtgagtcaccacccccaggacagmccccaacccctgcctggccaacatggtgaaaccccatctctattaaaaatagaaaaattagctgggcatgatggtgggcacctgtaatcccagctactcaggaggstgaggcaggcacatckcttgaacccrggaggcagaggttgcagtgagccaacgtcgtgccactgcactccagcctgggcgacagagcaagactccatctcaacaaaaaaaaacaaaaaacaacaaaaaaccccaacaacaacaacaaaaacatataattcagctcccaccgacccctccgctggcatctttgtacagccatgcaacacsgcccttcctagtttcgtttcctcctcagcctggcccaacactgaccccacaggtgctcagaaaacctgggatatcagaggagaggaattttaagcagtgccctgaccgatggggtccctggagttctctccccgagggagacctgacctagcagttcctctgaggatccagagggggtctggctgaaagccccatccctcaggaccagtgtgggaaactaaggcagagaaggagctagaacccaggtccaggagttcttgtgctccatcaggggtgtttcgggtcggcagggaggggccgatgggtgcacctccccatgcccccctgagccactagcctcacctccttctcctcctatcttagattgtgtttgtcctctcctcagcgctcaacccctggaacaaaggtgaggtgcccggggagggtggacgcatggctctgtgggtgggatctgggttctgggaggktggacgcatggctccgtgggtgggctctgggttcagggcctggatggagactaaaagccaggtgaggggacctagactccagactccagtgccatcctctccctgccggccacagagatgggcgatcacctggtgaaacacggtgacggagtgaaggacattgcgttcgaggtggaagattgtgactacatcgtgcaggtaagaaagcacctgggtggactgagagaggaaggcctccgtctgccatggggaccccatcagtcagggctggaaggacactgctgcatcacagtgacaagcccagatgccacatcacagtgacaagctcagatgctgcatcacagtgacaagcccagatgctgcatcacagtgacaagcccagatgctggtgtgacacacacctgggctccgggggtgccctgccttcccccgtgtcctctctctcactgagcctcagtttccacagctgccagatggggctaaccacagctgggttgtcaaaggaggaaattagaattaccatttccttttttttttttttttttttttttgtgagacggagttttgctcttgttgcccaggttggagtgcaatggcacgatctcggctcaccgcaacttctgcctcctggattcaagcaattctcctgcctcagcctcctaagtagctaggattacaggcatgcgccaccacgcccggctagttttgtatttttagtagagatggggtttctccttgttggtcaggctggtcatttccttttttttcttttttcattttctttttctttyttktgtgtgtgtgtgtgtgtcagagtcttgctctgttgcccaggctggagagcagtggcgcaatcttggctcactgcaacctccacctcctgggttcaagcgattctcctgcctcagcctcccgagtagctgggattacaggcgcctgccaccatgcccagctaatttttgtattttagtagagatggagttttgccatattggccaggctggtcttgaactcctgacctcaagtgatccacccacctcggcctccyaaagtgctgggattacaggcatgagccattttgcctggcctcagaattactgtttcttgagcacaactctaaaccaaacactgtacccaacaggcagcctacagattcagagtgtgcgttccagagccaggctctccaggtctgaatcttagccgtgtgacttcgggcaagtgacttaatgtctctgtgcttcaacgtcctcacctagagaatggagatgataatagtacttttgcataatgttgctgtgaggatgaacgaggttagaatctagaacagagcctggtgcatgatataagcactgtcatgcagtccagttttgctaaataaatgcatgaatcttcttattattctcatccaaccattctttttacagatggtgaaattgaggactagagaaggggactgatcacagggggmgttagcagaggcaggacagacacccatccctacctagtttgtctcccatagccccaactctgggcctgggcctcagtttccctatttgscaaatgagcatgagtattgggggtaatggctgaagctggctggggttcctacctggggctggagaaactggaggggsctgcaggaccacgcagaggccaccaggcaggagcagcaggcaagggttctggaaggctccagccctcaccaattccccgatcccatcttctctgcagaaagcacgggaacrgggygcyaaaatcatgcgggagccctgggtagagcaagacaagtttgggaaggtgaagtttgctgtgctgcagacggtgagttccctttggtgcccccacccctcctgctgtcggcaccactgagatgycaggagcccngcagctgactccatcaaaccatcccacccatgggccttggakcacagacattgtccctcaagtctgtcccccgtattgcctggccagtgtacggggactgcaggagccaccagccactcctcccaggcttcccttcctcccagtgcgggaggatgacagcaagggggtgaaggcaggggctctgaagaagggagaaggatggggtctggggacatcagttcccacacgagctgtgtgactttgggcatattactgtacctctctatgactctgtttaaatgagcaaagactggaactggaacacctatgtggtctgggacatgcgcttaactttcctgtgcctcagcagtatctttttgttttcctcaaaaaaatttttttttaaagatggagtctygctctgtcgcccaggctggagtgtagtggtgtgatcttggctctctgcaacctccgcctcccaggttcaagtgactctcctgcctcagcctcccgagtagttgggaccacaagtgcgtgccaccatgcccggctaattttttcttttttgtatttttagtagagatggggtttcaccgtgttagccaggatggtctcaatctcctgacctggtgatccgcccaactcagcctcccaaagtgctgggattacaggcgtgggccactgtgcccggcctttttcttttttttttattcttttttcttttttcagacggagtctctctgtcgcccaggctggagtgcagtcgcgtgatctcagctcactgcaacctctgcctcctgggctcaagtgattcttctgtctcagcctcctggggattacaggcatccacccgcacacacggctaatttttgtgtttttagtagagacagggttttgccatgttggccaggctggtctcgaactcctgacctcaagtgatccatccgcctcagcctcccaaagtgctgggattacaggcgtgagccaccgtgccaggctgttttcttcaactttcttttttctttttttttttttttttgagatggagtctcgctctgtcgcccaggctggagtgcagtggcacgatctcggctcactgcaagcgctgccttccgggttcaygccattctcctgcctcagcctcccgagtagctgggactacaggcgcccgccaccacgcccggctaaattttgtatttttagtagaggtttcaccgtgttatccaggatggtctcgatctcctgaccttgtgatccgcccgcctcagcctcccaaagtgctgggattataagtgtgagccaccgygccccacctcttcaacttttattataggttctggggtatatgtgctggatgttcaagtttgttacataggtaaacgcatgcatggtggtttgctacacagatcatcccatcacctaggtattaagcccggcatctgttagctactctccttggtgcactccctccccgacctcccccacctgacaggccctagtgtctgttgttccccgtgatgtgtccatcttttctcatcatttagctctcacttctaagtgagaacatgcagtgtttggttttctgttcctgcgttagtttgctgaggataacggcttccagctccatccatgtcccygtaaaggacatgatcttgttcctttttatggctgcaagcctcagtatcttcaactatgactcctcatagggtcatcgtaaggatccaatgagaactgggcgcagtggctcacgcccataatcccagcactgtaggaggctgaggcgggcgaatcacttgaggtcagaagttagcctggccaacatggtgaaaccccacctctactaaaaaaaaatacaaaagttagccaggcatggtggtgtgcacctgtagtcccagctacttgggaggctgaggtgggagaatcgcttgaacccaggaggcagaggttgcagtgagccaagattgcacctctgcactccagcctgggcgacagaacaagactccctctcaaaaaaaaaaaaaaaaaaaaaaaaaaaaaaggatccaatgaggtcatttgtgtatagcacttagaacagtgcctggcacattagacactcagcaaagatgaccaattctgtttaggaccygtgttactgtaatacagagacaatcatagctcttacctccttgagattaaattcaacataaagggctgggcacagtggctcacacctataatcccagcagtttgggaggctgaggcaggaggatcacttgaggccaggagttcgagaccagcatgggcaagatagggagaccccatctctacaaaaattawaaatacaaataaaaaataaataggccaggtgcagtggctcacacctgtaatctcagcaatttgggaggccaaggcaagaggactgcttgagcccaggaatttgagaccagcctgcgcaacaaagtgagaccccatctctacgaaaaaattaaaaattggccaggcatgatggagcatgcctgtggtcccacctacatgggaggctgaggtgggaggattgcttgagtccaggaggtagaggctgcagtgagctgttatcacaccactgcacttcagcctggttgacagagtgagactctgtctcaaaaataaatgaataggccgggcgcggtggctcacgcctgtaatcccagcactttgggaggccgaggcgggcggatcacgaggtcaggagatcgagaccatcctggctaacacggtgaaaccccgtctctactaaaaaaaaaaaaaaaaaaatacaaaaaagtagccgggcgtggtagcgggcgcctgtagtcccagctactygggaggctgaggcaggagaatggcgtgaacccgggaggcggagcttgcagtgagccgagatcgcgccactgcactccagcctgggcgacagagcgagactccgtctcaaaaaaaaaaaaaaaaaataaataaataaataaataaataaatgaataaaaatgttttaaaaagttaaaaaattaaattaaacataaaaatggttaaagtgtgcctgtaatcccagcactttgtgaggccgaggcaggtggatcacctgagttcaggagttcgagaccagcctggccaacgtggcaaaaccctgtctttactaaatatacaaaaattagctgggcatgacaggcgcctgtaatcccagctactcgggaggctgaggcagaagaatcacttgaacccgggagacagaggttgcagtgagccaaggttgcaccacygtactccagcctgggcgacagagcgagactccatctcaaataaataaataaaaattttaaaaaataaaagttaaaaaattaaattaaacataaaaatggttaaagtgtgcctgtaatcccagcactttgggaggccaaggtgggtggatcacttgaggtcaggagttcaagaccagcctggccaaaatggtaaaaccccatgtcactaagtaaaacaacacaaaaattagccaggtgtggggctgggcacggtggctcatgcttgtaatcccagcactttggaaggccaagggggcggatcacctgaggttgggagtttgagaccagcctgaccaacatggagaaaccccatctctactaaaaatacaaaattggctggacgtggtggtgcatgcctgtaatcccagctactcaggaggctgaggcaggagaatcgcttgaacccgggaggcagacgttgtggtgagccaagatcgcaccattgcactccagcctgggcaacaagagcggagctctgtctcaaaaaaaaaaaaaaattagccaggtgtggtggcacgtgcttgtagtcccagctatttgggaggctgaggcaggagaatcgcttgaacctgggaggcggaggttgcagagagccaagatcacaccactacactctagcctggccaacaagcaagactccgtctcaaacaaaaaaaaaaaaaaaaaaaaaggctaggtacagtggctcatgcctgtaatcccggcacttkgggatgttgaggtgggcccggcatggtggtacacgcctataatcccagctactcaggaggctgaggcaggagaatggcttgaacccgggagatggaggttgcagtaagccgagatcgtgccaatgcactccagcctgagtgacagagtgagactccgccttaaaaaaaaaaaaaaaaaaagatggttaaagtggctgacagaactcttcagtataattttttttttgagacggagtctcattctgtcgcccaggctggagtgtagtggcacgatctctgctcactgcaagctctgcctcctgggttcatgccattctcctgtctcagcctcccaagtagctgggactacgggcaccygccacgccaccacacccggctaattttttgtattttttagtagagacaggatttcaccgtgttcgccaggatggtctcgatctcctgacctcatgatccacccgccttggcctcccaaagtgctgggattacaggcctaagccaccgcgccaggctgctcttcagtataatttaatccaatgccctcctgcgttcttcatctagttgacctactgaaataaatgaagtaggtgcttcattgagtacctcccctgtgccaggcactgagcttggcgctgggtacaccatcatgagcaaaacagtgtccccgccctcanggaaactctcaaacaagtgacagattgcaattcatttcagaaaggagaagtgacttacccaagatcacgcatctggttagggtcagatgcaggttggaacccggggctacgttagcgctatgaaatgtgctctgtcctcggcggggatgggtgcccaggggccgagccaggctgttttccacccgtagtatggggacaccacacacaccctggtggagaagatgaamtacatcggccaattcttgcctggatrtgagsccccagcgttcatggaccccctacttcctaaactgtgagtgtccctcagggcagaggtgggtggaaasccctgagggactgtgaaaagtaatgccccttcctccatgtccactgcgcatgtgtgttggggcagaatggagccggctagggaattcctggaagtcctcaggggtgcttgaagaggtggcacagaggctgagaccatggcctctgcaaccaaacttccccgggttcaaatcccagctctgttacttcacagccatttcaccctgggcaagtcgcttcatctctctaggcctcagtttcttcatctgtaaaatggggactgtaatagtawatgagttgacaaaataaaatgtccggcccattagtaaatgctacataagtgtgagtccaggcgcagtggctcatacctataatcccagcactttgggagtctgaagcaggaggttcacttgagccccagagttttagaccaacctgggcaaaaaaagagtctctctttttgtagagactccatctctacaaaaaaatagaactccaaaaacagaagtgtgagctattattattattgaggggtcatggagaagggagcaatctggggggtagccaccttctcacccccatcttcttcccttcccaggcccaaatgcagtctggagatgatcgaccacattgtgggaaaccagcctgatcaggagatggtgtccgcctccgaatggtgagaccttggccctctccctctgcgtgaagatgacgggtcctcacggtggactggcccactccctggtccttgcactaacatggaaaatacgactgggtgcagtggctcacacccgtaatcccagcattctgggaagccgaggtgggaggatcacttgaggtcaggrgttcaacaccagcctgaccaatatggagaaaccccrtctctactaaaaatataaaaactcagtgggcgaggtgttgggcccctgtaattccagttactcaagaggctgaggcaggagaatcgcttgaacccgggaggtggaggttggkcgacagagtgagactccagcctgggaaacagagcaagattttgtctccaataaacaaatamaataaaatagaccgggcgcacttgctcacgcctgtaatcccagcactttgggaggcggaggcgggtggatcacctgaggtcaggagttcaagaccagcctgaccaacatggcgaaccccsgtctctactaaaaayacaaaaattagctgggtgtggcagtgtgtgcctgtaatcccagctacttgggargctgagacaggagaatcgcttgaaccaggaaggcggaggttgcagtgagctgagattacgccactgcactccagcctgggtgagagagagagactttgtctcaaaataataataataataataaagtaaaataaaataaaagtggaaaatacagcacaagatgttgggagttagcctgaggccactgatgcatttattcactgtaaaactgtcaacatggagaccagtggacttgaggcccaaagcgacccacaggccctccttctgaggaaccctggggacatcacagtccagggaggcttggaggaaggttgccaccacccagagagccccctgtccaaattccaagcaagggcctttttctcaaagcactttacttccatctgtgggagccttgccgtcctgtatgtatttcgttccaagacacttccacctgaaggaaaaatgtcatcataaaggtacaaatctaggctgggcgtggtggcccatatttggaatcttagtactttggaggcccaggcaggtggatggcttgaacccaggagttcaagacagcctgggcaacatagtgagaccccatctctacaaaaaatacggccgggcacagtggctcatgcctgtaatcccagcactttgggaggccgaggcgggtggatcacctgaggttaggagttcgagaccagcctgaccaacacagtgaaacactgtctctactaaatacaaaaaattagttgggcatggtggtgcatgcctgtaatcccagctacttgggaggctgaggcaggagaatcgcctggacccaggaagtggcagctgcagcgagccgagattgcgtcactgcattccagcctgggcgaaaagagcgaaactccgtctcaaaaaacaaaaaataaaaataccccaaaattatccaggtgtggtagcacatgcctgtagtcccagctacttgggaagctgaggtgggaggagcaattgagcctggagattgaggytgcagtgagccaagactgcaccactgcactccagcctgggcaagagtgagactctgtctcgagcaacaacaacaacaaaaagatctaaatctctgatgggtatgatggcagtggcatctcctttctggagcctgctcagggacagattctggaaggtggaaatgggtgatggaggccgtccctggaggcgctcagagcatatgtgttccaccgcccaccctacaggtasctgaaaaacctgcagttccaccgcttctggtccgtggatgacacgcaggtgcacacggaatatagctctctgcgatccattgtggtggccaactatgaagagtccatcaagatgcccatcaatgagccagcgcctggcaagaagaagtcccagatccaggtgaggccgcccctggctgggrgagaggggagcagggaagaggtctgggggctcttgtagggtcagggatgtgggtgatggggcaaatgacagtggtctccttgtttccctcccccaggaatatgtggactakaacgggggcgctggggtccagcacatcgctctcaagaccgaagacatcatcacagcggttagaacccccttccctgtccgaattcctctctcattcagagccagggacgntctctgcaaaattgagagggcgggtggcggcagtcctgggcccgtttctctgggctgggagactgacaggactccctcactgcttcttgcaactcatgggcaggcacagccacacccacccccagagagttcagtctccacagaacccctgggctttggaggtagcaggcgccagggtatcaggaagcctgggtgatggtcccggttctgccagtggcttgctctgtgtctctgggagattcagtgctgtctctggactttagttgccttaccttaaaaatcaggaaattagggccgggcacagtggctcacacctgtaatcccagcactttgggtggccaaggcagggggatcacctgaggtcaggagtttgagaccagcctggccaacatggtgaaaccccatctctactaaaaatacaaaaattatctgggcgtggttgcgggcacctgtaatcccagcttctcaggaggctgaggcaagagaagtgcttgaactcaggaggtagaggttgcagtgagccaaggtcgcaccactgtaccacagcctgggcgacaagagtgaaattctgctttagaaaaaaataatagtaattaataaaggaaattaggactgggcacagtggcttatgcctgtagtcccaactacacgggaggccaaagcagaaggattgtttgagcccataagttagagatcagcctggaaaacagtgggaccctgtctctgcaaaaagtaaacaaaattaaccaggcttggtggttcatgcctgtagtcctagctacttgggaggctgaagcaggaggatccatttagccaaggatttcaaggctgcagttagctatgattgagccacttttctccagcctaggtgacagagagtgaggccctatctccccgcaacctcaaaaaagaaattttttttaaaatgaggaarttaaggttgggcatggtggctcatgcctataacagtttctgcccttgtggagcaataaacaaaataagtaaaatataaatgctagatggtagagagcacccaggaagaaagtaaagcagggaattgggacagcaagggtgaatggcattgcacatttaaattggggggtcagacactgtgggaggccgaggcaggaggactgcttgagctcagaagttcaagaccaacgtgggcaacatagtaagacctcatccttttttttttttttttttttgagacggagcctggctctgtcgcccaggctggagtgcagtggcgcgatctcggctcactgcaagctccgcctcctgggttcacgccattctcctgcctcagcctcccaagtagctgggactacaggcacccgccaccacgcccagctaatgtttttttttgtatttttagtagagacggggtttcactgtgttagccaggatggtctcgatctcctgatcttgtgatctgcccaccttggcctcccaaagtgctgggattacaggtgtgagccactgcgcccggccataagacctcatctttacaaaaaaatcaaaaaattagccaggtgtggtggtgcacacctgtggttctagttacccagaagtctgaagtaggaggatcagctgagcctggggaggttgaggctgcagtgagctaagatcatgccactgcactgcagcctgggtgacagaacaaagaccctgtctctcaaatatatatatgtgtgtgtatatatatatatatccttcttttttgagatgcagtcttgctctgtcttctaggctggagtgcagtggtgcgattttggctcactgcaacctccacctcctgggttcaagcgattctcctgcctcagcctcccaagtagctgggattacaggtgcatgacaccacgcctggataactttttttgtattttatttttattttttattttttatttattttattttattttgagacagagtctcgctctgttgctcaggctagattgcagtgacgcgatctcggctcactgcaagctctgcctcccgggtttacgccattctcctgcctcagcctcccaagtagctgggactacacgctcccaccaccacgcccagctaattttttttttgtatttttagtaggggtttcactgtgttagccaggatggtcttgatctcctaacctcgtgatcacccatcttggcctcccaatgtgctgggattgacaggcgtagccacctcgcccggccttttttttgtatttttaatagagacaggattttgccatgttggtcaggctggtctccaactcctgacttcaagtgatctgcccgcctcagcctccaaaagtgctgggcttacaggcgtgagccaccacactcggcctaatagatccttaatcgtttcatgcctcagtttccccagctatgaaatgggagaatagtccttcagctgcctcaaaagattgctgcatggacataatgagggaatacgtagaaagtgctcaggccgggctcatctgtcacgcctgtaatcccagcactttgggaggccgaggtaggtggatcgcctgaggtcaggagttcgagaccaacctggctaacatggtgaaaccccatctctactaaaaatacatagctgagtgtgatggtagtcacctgtaatcccagctactcaggaggctgaagcaggagaatcgcttgaaccgggaggcagaggttgcagtgagctaagatcgtgccactgcactccagcctgggcaacagagactccatctcaaaaaaaaagaaaaaaagaaagtgctcaaggcaggcacatggtgagtgttctataaatctagcagttgttgttctaacggggcccatgacagagaagaaaggggaagaggccacacagcatcctggcagttgaggggagctaggatagggaccctgtatcctgatgacccagcacctccacctggctaggggagttgaacttggaggccgaaggctgacctcagctttgctctgaaacagattcgccacttgagagagagaggcctggagttcttatctgttccctccacgtactacaaacaactgcgggagaagctgaagacggccaagatcaaggtgaaggagaacattgatgccctggaggtgaggcccaggcaggatccgcagccttgtggggggagtaygagctctgcattgcatcttttcagaaatattgtctcagcccggaggggagcccagaccaagtccctgctggcaaaggacatttattctagggtctatgtgggaggaggagacagatgacaaacaaataaacaataaaagcacggtcagagatagtcagtgcaggaagttcaaacaggcagcctggggctgctttacagagactggtcagggagggcctctctgaggaggtgacatctgagtgaagtctagatcatgagcgggagctggccatgtgaacagcgggaagaaaggcattcctggcagagggatcagcaagggccgaggtaggagcatgccctgagcgtctgaggaacagaaagaataggctagagtggatgggaggctgyttttgagcgatgacctaggtcagacaggtaagcaagagccagttcctcttgtgagctattattcaggaatctggattttgttcttttgtgaccagaaaccactggagggttttttggtttggttttagcagtgttattgacatatgtcacataacatgtcatttttttaaggtgtacaattctatgatttctagctatttgctatgttgtgcaactatcatcmaaatccattttaggactgggtgtggtggttcatgcttgtaatctcagtactttgggaggccgaggcgggcggatcatgaggtcaggagttcgagaccagcctgaccaacatggtgaaaccctgcctctactaaaaatacmaaaattagccaggcgtggtgacacatgcctgtaatcccagctactcaggaggctgaggcaggagaatcacttgaacccgggaggcggaggttgcagtgagccgagattgcgctactacattccagcctgggcracacagtgagactctgtctcmaaaaaaaaaaaaaaaaaaaaaaagatccattttaggactaggtatggtggttcatgcctgtaatcccagcactttgggaggccaaggcaggtggatcacttgaggtcaggagtttgagaccagcctggtcaatatggcgaaacccccatctctacaaaaagaaaaaaaaaaattagctgtgcgtggtgatctgtgtctgtggtcccagctactggggaggctgaagtgggagaatcacttcaacccaggaggtagaggctacagtgagccatcatcaggccactgcacyccagcctgggtgataccctgtctaaaagaaaaacaaaaacagttaggccagacacagtggctcacacctataatcccagcattttgggaggttgaagtgagaggattscttgaggccaggagtttaagaccagcctgagaaacacagggcgaccctgtatctacaaaaaaaacagttttaaaaaattagctgggcatggtggttcstscctgtagtcccagctactcaggaggctgaggtgagaggatcacttgaggccaggaggtcaaagctgcagtgagccatgatcaggctactgcattccagcctgggcaaaaaatcaattttagaacatttttgtcaccccaaaaagaaaccttgagcctcttagccagcacctcccaaccccctctgttcccttcccccctcccaccccagccctaggcaccattaatctaccttcagtctctatagatttgsctattctggacatttcatcaaaaggaatcacaaagtccaggcacggtggctcatgcctgtaatcccagcactttgggaggctgaggtgggcggatcatgaggtcaggagttcaagaccagcctggccaacatggtgaaaccctgtctctactaaaaatacaaaaattagctgggtgtgatagcagatgcctgtaatcccagctactggggagcctgaggccggagaattgcttgaacccagggaaggggaggttgcagtgagccgagatcgcgccattgcactccagcctgggcgacagagtgaaactccatctcggaaraaaaaaaaaaggaatcacaaaataggcctattgtgagcagcttctttcccatagcatgtgctcaaggttcatctgcgtggggtgtgtgtcagtgcttcgttcctttttgtggctgaaaaatatcccattgtatagatagacacacattgtttatctattcytcgttgatagatatttgggttgtttccacttttggggtgttatacgtaatgctactgtgaacatctatgtacaaggctctgtgtggacgtgttttcaatgcactttggwatatatctaggagtagctaggtcacatggtaattccatgttcccttttgtttgtttagagatggagtcttgctttgtttcccaggctggggtgcagtggtgcgatcttggcccattgcaacctccagcctcctgggttcaagcaattctcctgcctcagcctccccagtarctgggattataggcgcccgccaccacgcccagctaatttttttttttttttttttgagacagagtcttgctctgttgcccaggctggagagcagtggccgatcttggctcactgcaacctccacttcccgggttcaagcgattctcctgcctctgcctcctgagtagctgggataacaggcgtgtgccaccatgcccagccaatttatttttatttttagtagagatggggtttcaccatgttggccaggctggtctcgaactcctgacctcgggtgattcactcacctcagcctcccagagtgctgggattacaggcgtgagccaccttgcccagcctaatttttgtatttttttttgtagtgactgggtttccccatgttggccaggctggtctcgaactgagctcaggtgatccacctgcctcggcctcccaaagtgagccaccatgcctggccacccccttttttttttttaatccgtattttaaggaagcaacactatatgtttaactttttgagaagctgccagactgttttccaaagtggttgcaccattttacagtcccaccagcagtacatgagggttccgatttccactggaggattttaaacaggggaatgacatgatccgacttttaaaagatcccgcagcaggtcatggtggctcacgcctgtaatcccaacactttgggaggtcgaggygggtggatcacctgaggtcaggagttcgagaccagcctgaccaatatcgtgaaaccccgtcttactaaaaatacaaaaattagccgggcatggtagcctgcgcctgtagtcccagctactcgggaggctgagacaggagaatcgcttgaacccggaaggcggaggtttcagtgagccaagattgcgccaccgcactccagcctgggtaacagcgcaaggctccgtctcaaaaaagaaaaagaaagtgtcctgataatgtctgcggggaggatggattgtaaggatacaagattagaagcgggcagcagtcttgaatggtgccttaggaactgtagtagggggatagtaataggacagtttggggatatatttggaggtggctgaactgccagaaaaagaggtcatttccagacttttggggtgcaggagcccctgtggactttccaaggatctcaccgtgccagcctcccctagcagagccccctgtctcccgcctaggagctgaaaatcctggtggactacgacgagaaaggctacctcctgcagatcttcaccaaaccgktgcaggaccggcccacgctcttcctggaagtcatccagcgccacaaccaccaggtactgcttgtccccggcaggcccgaggggacaggcagctagcacactcggttttctgggtccttggctcatctcctctctttcccgccacagggttttggagccggcaacttcaactcactgttcaaggctttcgaggaggagcagaacytgcggggtaacctcaccaacatggagaccaatggggtggtgcccggcatgtaagccccgcccaccccacggaggccacagccacacagccacgccccctgattctggaactcgcccaacttccctactggctgctccccwwgggtcccgcccaccagcggactcggcccccaasgctccgcccacactgaccacgcccctcggsggggccgccctctgctccagccctcccgattaaagcgtgccccggtccaatactgtgtctgtgtttgtgttgcgcataaggcagtagtgccttatggcagccagggggaggccagggcggccgccagcgccgcgggaccgaggagctgcgggtgccagcgctttgccagcgggaccacgcggagaggggaattctggaaccagggaaggaaggggacttgctctggagggaaagacggatgacactgcttttgtagagagataaacgcgattcagacaataaagcaagcgatgagccgggcgtggtggctcacacctgtaatttcagcgctttgggaggcagaggtgggaggatcgcttgaggccaggagttcgagcccagcccggtaacatagcaagaccccgacccccctgcgtctacacaaataacaaataaaaattagcctggcgtagtggcgcacacctgtggtcccagctactcaggaggctgaggtgggaggatcgattgatggacagaggtctaagctgcagcgagccctgatcctgacactgcactccagcctgggcaagagtgagaccctgtctcaaaaaaaaaaaaggcagttgatgagaatatgtggaagcgaagatcgcaggggagctaattttgataacggaagacctctccgagaaggtgacatttgggagccagccatgggaccatgctcgggaaaaggattccaggaagagcgaacggagaaaggccctgaggtggggtcagagtttggcagcatcttgtctgccggcttgatgatctctttttgttgttgttgagacggagtttcgctctgtcccccaggctggagtgcagtggtgcgatctcggctcactgcaagctccgcctcccgggttcacgccattctcctgcctcagcctcccgagtagctgggactacaggcgcccgccaccacgcccggctaattttttgtatttttagcagagacggagtttcaccttgttagccaggatggtctcggcctcccaaagtgctgggattacaggcgtgagccaccgcgcccggccgatgatctctaaagatgagctgtcttcagttttgctacccagagcccaaacctctgaacacaggagaggggagagtgttagacaagggactctaggggcagcatccctgctcatcaactgtaggatatggtcccttggttcctggtctcagagataaagcaggtaggaggggcctggtatcccagtccctgccctcagcagggcagtgcccatgaccacccacgcagctgcactgccccagccttgcccgcagtgaggacttcttttggaaaggggcttgttcatactcatagaagagtgagtgatccttgcaaaagaatgaggcagctgggtcctaaaaccctaggaaggagattctttcttcaaaaccaggtaagagttggtggtgggcaaatttggcctcttttttttttctttttctctctttttttttttttttttagacagagtctcactccattgctcaggctggagtgcagtggtgtgctcttggcttactgcaacctccaccttctgagctcaggtgatcctcctacctcagcctcccaagtagctgggactataggcatgtgccaccacgcccagctaattttgtttttatttttcatggagatgggatctcactatgttggccagtctcgaattcctggtctcaggtgatccgcccacctcagccttccaaagtgctggaattataggaatgagccactgtctctggcctctttctgcttctaatgcttgagaaccctccgtgaggataagtcaactcagagctaggaggcagcagagctcaatagaagaaaaaaatactctgagttggtataatggtgggaattggggatttttttcagattatagaagaaatcagagcttctgggatcacgaacttcagaaataaagagatcagagagaacccaaaggattccgtgcaaaaaaaatactccccctctattctcctgtgacttaatgtgaagaagggaaattgtataacccagaaggatgcaaactagtggcttacagaccaaatgtggctcatagacctacttcgttttgcctgcatggtttcaaacaaatttgagtcaacattttagaaagttgggcacatatggccaggtgcggtagctcatgcctgtaatcccagcactttgggaggctgaggcaggtggatcacttgaggtcaggagttagagaccagcctgcccaacagggtgaaacctcgcctctactaaaaatacaaaaattagccgggaatggaggagggtgcctgtaatcccagctactcgggaggctgaggcaggagaatcctttgaacctgggaagtggagcttgcagtgagccgagatcacgcctctgcactctagcctgggtggcagagtgagactccatctcaaaaataaatattgggaggtcaaggtgggtggatcacctgaggtcgggagttcaagaccagcctggccaacatggtgaaaccccatctctattaaaaatacaaaattagctgggcctggtggtgcgcacctgtaatcccagctactcgggaggctgaggcaggagaatcactcgaacccaggaggcagaggttgcagtgagatcgcaccactgcactccagcctgggcaaaaagagcgaaactccatctcataaatacataaataaataaataaagcatgcagagcagacacccactagctgagaacatactagagagccaggctgcctgagttcacctctcagatagccacgtggtagctgtgtgacctatggcaagctacttgacctctcagtgcttcagtttcctatgttaagtgggaattataataataccctcctcctagccctgttgctagtatcaaagacgtttaaaacagaggctggcacagtcaatgctatatgaatagtcttattttggggggaggggctcttgcccacaagggaacccaagtctgtctgggacctccctctctctgtctgaggtctctgtcaccaaggctggagagcagtggcatgatcacagttcactgcagccttgatctccccagtttcagcgatcctcctacctcagcctccctaatagctgggaccataggcatatgccaccacgcctggctaatttttgtatttttagtagagacagggtttctccatgtttcccaggctggcctcaaactcctggcctcaagtgatcctttctcctgcctcagcctcctgagaagctggagaggggctcccattttggcccccacaatacaatagaggcaatgaagaaaggagttatctcttgggactgaggagcagaggaagaggtggatggatttgaggaatagggaagaagcatcagatttggtaggtaagggagggaaagagaaggtttaaatccaggatccctggcctttgagcttaggtggtcagtggcaggcagcggtgggtggaggcagagaacagaagtgtcattgaccaaagtagaaaatatgacaggagagcaagttcaagagagaagatgaagacaggcgcagtggctcgtacctataatcctggcactttgggaggccgaggccagaggattgcttgagcccaggagttcaagaccagcttgggaaacatagtgagaccctatttctataaaaatttaaaaattggccggatacaggtggctcacacctgtaatcccagcactttgaaaggctgaggcgggaagattacttgaggttaggcatttgagaccagcctggccaacatggtgaaaccccgtctctactaaaaatacaaacattagccgggcatgatggcacatgcctgtaatcccagctactcaggaggctgaggcaggagaatatcctgaacccaggaggcggaggttgcagtaaccgagattgcgccactgcactccagcctgggcgacagagtgagactctgtctcaataaaataaataaaataaaaaatagagatagggtttcgtctcttctaataataaaaaaactagctgggtatggtggtgcgcagctatagtcccagctactcaggaggctgaggcatgagaatcccttgaacctgggaacctgggaggcagaggttgcagtgagccgagaccataccattgcactccagcctgggcaacagagagagactgcctcaaaaaaaaaaaaaaagaaagaaaaaaaggccgggcacggtggctcatgtctagaatcccagcactttgggaggccaaggcgggcggatcacttgaggtcaggagttggagaccagcctggccagcatggtgaaactccatctctactaaaaatacaaaaaacttagccgggcatggtggcacatgcccgtagtcccagctacccgggaggctgaggtgggagaatggcttgaacccagaaggcagaagttgcagtgagccaagattgcaccactgcactcaagcctgggtgacagagcaagactctgtctcaacaacaacaacaacaaaaaaaaaaaaaaagaaaaaaaaagaaaaaagaaagaaagaaagaaagaaagaaagaaagaaagaaagaaagaaaagaaagaaagaaaaagccctggcgcggtggcttacacctataatcccagcactttgggaggccgaggagggcacatcccctgaggtcaggagttcgagaccagcatgcttaacatggagaaatcccatctctactaaaaatacaaaattagctgggcttggtggcacatgcctgtaatcctagtaatccctgtaatccctactcaggaagctgaggcaggagaattgcttgaactcggcaggtggaggttgcagtgagccgagattgtaccattgcactctagcctgggcaacaagagcaaaactctgtctcaagaaaaaaaaaaagaaaagaaatttttaaaattagctggtatggtaaagtgtgcctatggccctgatcagcttaggaggttgaagtggggggatcattgagctcagcagatcgaggctgcagtgagctatgatcatgccactgcactccagcctgggtgacagaactagaccttgtctctaaaataaataataaaggtaaaattgtatattccttcagctacacccccttctcttagctttattcctccttactattgcacttacttttcacatttgtctggctcgccctcaagaacagtatgtttccttcattcctatccccagagcctagaagagtacctggcacatacaaggtgctcaataaatattggttgattgaattaatggccagacacttccttctctttcctggctcagcccggacctcagccctctattcccatgaatccacttacgggagtgtccacctgtctggatgcacaattcctaaaagcagcccactgtgaacggacaatttactctcccttcgtttcgttgataccagaaatgaggctgcgaagaacactcttcttcatattgttgcccactgtatctgtcaggctcaattcctcacagtggaacaacggagccaagacttttgtgtgcatttgatcattttattttgagacgaggtctcactctgtcgcccaggctggagtgcagtggcatgatctcggctccctgcaacctccaccttctgggttcaagcgattctcccacctcagcctcccaagtatctgggattacaggcgtgcaccaccacactcggctaatttttttgtatttttaatagagatggggttttaccatgttggctaggctagctcgaactcctgacctcaggtgatctgccctcctaggcctcccaaagtgctgggatcacaggcgtgagccaccgtgccggccgtgtgcattttaaataatgattactaataggtatttttcctcctaaaggttgcagtgatttttggcttcccctaatgacacacgagagtaccccagcctcctgctccctcaaattgggtttcctccaccttttaatatttgccaacctgacagggggaaacggcatcctgggataattcacatttctccagtaggaag

SEQ ID NO: 94227 - DNA, 55660 bp, Homo sapiens
  misc_feature (1)...(55660): n = A,T,C or G
nnnnnnnnnnnnnnnnnnnnnnnnnnnnnnnnnnnnnnnnnnnnnnnnnnnnnnnnnnnnnnnnnnnnnnnnnnnnnnnnnnnnnnnnnnnnnnnnnnnnnnnnnnnnnnnnnnnnnnnnnnnnnnnnnnnnnnnnnnnnnnnnnnnnnnnnnnnnnnnnnnnnnnnnnnnnnnnnnnnnnnnnnnnnnnnnnnnnnnnnnnnnnnnnnnnnnnnnnnnnnnnnnnnnnnnnnnnnnnnnnnnnnnnnnnnnnnnnnnnnnnnnnnnnnnnnnnnnnnnnnnnnnnnnnnnnnnnnnnnnnnnnnnnnnnnnnnnnnnnnnnnnnnnnnnnnnnnnnnnnnnnnnnnnnnnnnnnnnnnnnnnnnnnnnnnnnnnnnnnnnnnnnnnnnnnnnnnnnnnnnnnnnnnnnnnnnnnnnnnnnnnnnnnnnnnnnnnnnnnnnnnnnnnnnnnnnnnnnnnnnnnnnnnnnnnnnnnnnnnnnnnnnnnnnnnnnnnnnnnnnnnnnnnnnnnnnnnnnnnnnnnnnnnnnnnnnnnnnnnnnnnnnnnnnnnnnnnnnnnnnnnnnnnnnnnnnnnnnnnnnnnnnnnnnnnnnnnnnnnnnnnnnnnnnnnnnnnnnnnnnnnnnnnnnnnnnnnnnnnnnnnnnnnnnnnnnnnnnnnnnnnnnnnnnnnnnnnnnnnnnnnnnnnnnnnnnnnnnnnnnnnnnnnnnnnnnnnnnnnnnnnnnnnnnnnnnnnnnnnnnnnnnnnnnnnnnnnnnnnnnnnnnnnnnnnnnnnnnnnnnnnnnnnnnnnnnnnnnnnnnnnnnnnnnnnnnnnnnnnnnnnnnnnnnnnnnnnnnnnnnnnnnnnnnnnnnnnnnnnnnnnnnnnnnnnnnnnnnnnnnnnnnnnnnnnnnnnnnnnnnnnnnnnnnnnnnnnnnnnnnnnnnnnnnnnnnnnnnnnnnnnnnnnnnnnnnnnnnnnnnnnnnnnnnnnnnnnnnnnnnnnnnnnnnnnnnnnnnnnnnnnnnnnnnnnnnnnnnnnnnnnnnnnnnnnnnnnnnnnnnnnnnnnnnnnnnnnnnnnnnnnnnnnnnnnnnnnnnnnnnnnnnnnnnnnnnnnnnnnnnnnnnnnnnnnnnnnnnnnnnnnnnnnnnnnnnnnnnnnnnnnnnnnnnnnnnnnnnnnnnnnnnnnnnnnnnnnnnnnnnnnnnnnnnnnnnnnnnnnnnnnnnnnnnnnnnnnnnnnnnnnnnnnnnnnnnnnnnnnnnnnnnnnnnnnnnnnnnnnnnnnnnnnnnnnnnnnnnnnnnnnnnnnnnnnnnnnnnnnnnnnnnnnnnnnnnnnnnnnnnnnnnnnnnnnnnnnnnnnnnnnnnnnnnnnnnnnnnnnnnnnnnnnnnnnnnnnnnnnnnnnnnnnnnnnnnnnnnnnnnnnnnnnnnnnnnnnnnnnnnnnnnnnnnnnnnnnnnnnnnnnnnnnnnnnnnnnnnnnnnnnnnnnnnnnnnnnnnnnnnnnnnnnnnnnnnnnnnnnnnnnnnnnnnnnnnnnnnnnnnnnnnnnnnnnnnnnnnnnnnnnnnnnnnnnnnnnnnnnnnnnnnnnnnnnnnnnnnnnnnnnnnnnnnnnnnnnnnnnnnnnnnnnnnnnnnnnnnnnnnnnnnnnnnnnnnnnnnnnnnnnnnnnnnnnnnnnnnnnnnnnnnnnnnnnnnnnnnnnnnnnnnnnnnnnnnnnnnnnnnnnnnnnnnnnnnnnnnnnnnnnnnnnnnnnnnnnnnnnnnnnnnnnnnnnnnnnnnnnnnnnnnnnnnnnnnnnnnnnnnnnnnnnnnnnnnnnnnnnnnnnnnnnnnnnnnnnnnnnnnnnnnnnnnnnnnnnnnnnnnnnnnnnnnnnnnnnnnnnnnnnnnnnnnnnnnnnnnnnnnnnnnnnnnnnnnnnnnnnnnnnnnnnnnnnnnnnnnnnnnnnnnnnnnnnnnnnnnnnnnnnnnnnnnnnnnnnnnnnnnnnnnnnnnnnnnnnnnnnnnnnnnnnnnnnnnnnnnnnnnnnnnnnnnnnnnnnnnnnnnnnnnnnnnnnnnnnnnnnnnnnnnnnnnnnnnnnnnnnnnnnnnnnnnnnnnnnnnnnnnnnnnnnnnnnnnnnnnnnnnnnnnnnnnnnnnnnnnnnnnnnnnnnnnnnnnnnnnnnnnnnnnnnnnnnnnnnnnnnnnnnnnnnnnnnnnnnnnnnnnnnnnnnnnnnnnnnnnnnnnnnnnnnnnnnnnnnnnnnnnnnnnnnnnnnnnnnnnnnnnnnnnnnnnnnnnnnnnnnnnnnnnnnnnnnnnnnnnnnnnnnnnnnnnnnnnnnnnnnnnnnnnnnnnnnnnnnnnnnnnnnnnnnnnnnnnnnnnnnnnnnnnnnnnnnnnnnnnnnnnnnnnnnnnnnnnnnnnnnnnnnnnnnnnnnnnnnnnnnnnnnnnnnnnnnnnnnnnnnnnnnnnnnnnnnnnnnnnnnnnnnnnnnnnnnnnnnnnnnnnnnnnnnnnnnnnnnnnnnnnnnnnnnnnnnnnnnnnnnnnnnnnnnnnnnnnnnnnnnnnnnnnnnnnnnnnnnnnnnnnnnnnnnnnnnnnnnnnnnnnnnnnnnnnnnnnnnnnnnnnnnnnnnnnnnnnnnnnnnnnnnnnnnnnnnnnnnnnnnnnnnnnnnnnnnnnnnnnnnnnnnnnnnnnnnnnnnnnnnnnnnnnnnnnnnnnnnnnnnnnnnnnnnnnnnnnnnnnnnnnnnnnnnnnnnnnnnnnnnnnnnnnnnnnnnnnnnnnnnnnnnnnnnnnnnnnnnnnnnnnnnnnnnnnnnnnnnnnnnnnnnnnnnnnnnnnnnnnnnnnnnnnnnnnnnnnnnnnnnnnnnnnnnnnnnnnnnnnnnnnnnnnnnnnnnnnnnnnnnnnnnnnnnnnnnnnnnnnnnnnnnnnnnnnnnnnnnnnnnnnnnnnnnnnnnnnnnnnnnnnnnnnnnnnnnnnnnnnnnnnnnnnnnnnnnnnnnnnnnnnnnnnnnnnnnnnnnnnnnnnnnnnnnnnnnnnnnnnnnnnnnnnnnnnnnnnnnnnnnnnnnnnnnnnnnnnnnnnnnnnnnnnnnnnnnnnnnnnnnnnnnnnnnnnnnnnnnnnnnnnnnnnnnnnnnnnnnnnnnnnnnnnnnnnnnnnnnnnnnnnnnnnnnnnnnnnnnnnnnnnnnnnnnnnnnnnnnnnnnnnnnnnnnnnnnnnnnnnnnnnnnnnnnnnnnnnnnnnnnnnnnnnnnnnnnnnnnnnnnnnnnnnnnnnnnnnnnnnnnnnnnnnnnnnnnnnnnnnnnnnnnnnnnnnnnnnnnnnnnnnnnnnnnnnnnnnnnnnnnnnnnnnnnnnnnnnnnnnnnnnnnnnnnnnnnnnnnnnnnnnnnnnnnnnnnnnnnnnnnnnnnnnnnnnnnnnnnnnnnnnnnnnnnnnnnnnnnnnnnnnnnnnnnnnnnnnnnnnnnnnnnnnnnnnnnnnnnnnnnnnnnnnnnnnnnnnnnnnnnnnnnnnnnnnnnnnnnnnnnnnnnnnnnnnnnnnnnnnnnnnnnnnnnnnnnnnnnnnnnnnnnnnnnnnnnnnnnnnnnnnnnnnnnnnnnnnnnnnncgggcgtgatggcgggcgcctttaatcccagctactccggagctgaggcaggagaatcgcttgaacccgagaggcggaggttgcagtgagccgagatcacgccactgcactccaggcctgggtgacagagtgagactacgcttaaaaaaaaaaaaatcacaatagttagcatttacaaagcgttgggaattctacttggcacgtggccagagctccgtagtgatgggcaacgaacacgtggtctgcgcgcccggggccgcgcggtctggcggggccgcgcggtctagatcacgctactccgggtcccaaggccccgccctcaggccccgcccacagaccatgtcctcggccccgcccctcacgcgcccttgggccccgcccccgagccgacaggaacgagcgtcattgcgaggcggcctcgcgcgcagcttccttggggccagggaccccagtggggccggtacatctccccgccccggcctctgcaccctggagggacggcaggagggctctctgtgcagtttgagagaacacccatacgcaggaaatgaccccaacgccaccgagagggcgcctggaatgtgagcgccacctgctgggatgggaagaggtctgggaggggacctgaaggatggttcacagggaaccaggcctgtcgggtgattgctggaaagatggcatggacgggagctggctgctctggccactcagccgaccccagctggacgcggccagggcctggggcagggggccaggcctggggaggcccaacagcacgccccctggagccagcgcctcccgcactgcccagcctgtgtgtcaggagctggggtgaaggtcccatcacagtcaggccccatccctgctgggcgtggctgtgcaggagccccgcaaatatgtttatatatttagtatgtgagttatatttcaataaagctgatatgagatatacttcacatatcatgcagttcacccattcaactcgtttcgagtggacagttgagtggtttttaggacattcacagataggagctgaggtcaatattacagcactttcatcgccccgaaagaaacctgctaccctttgtagtcgctccttattaccccttccccagcccccggtgaaaactcatctaatttctgtcttcatagatttgcatttcctggacatttcatacaaatggatcacataatgcgtagtctcctgtgactggcttctttcacctagcattttttttttttttttttgagacggagtctcgctctgtcgcccaggatggagtgcagtggcacaatctcggctcactgcaacctccacctcccggatttaagggattctcccacctcagcctcccgagtagctaggattacaagcgcccgccacaatgccagggcaatttttgtatttttagtaaagatggggtgtcaccactttgcctaggctggtctcgaactcctgacctcaagtcatccgcccgccttggcctcccaaagtgctgggatgacaggcgtgcgccgccgcgcccggcctgcctagcataatgttttcaaggtccagctgtgctgtagcatgcgcatgcttcgctcctctatggctaataacatgccgctattatcaaaatgctgcaactaggagcgctagtgtgtaaatttggcgtggacacttgtttccaggtttgaggagctgccacattgcttttcagagtggctcaggagctaatttttttgcagggtaccatgtcaacaatttgggtcaactaaaatcagcgtgtccgcaccattttcgcccgcccaatttcacgcgatcctgcgaaagaatgacccagaccggtccgggcgcggtggctcgcgcctgtaatcccagcactttgggaggccgaggcggcagatcacaaggtcaggagttcgagattggcctggccaacatagtgaaaccccgtctctactaaaaatacaaaaattagccgggcgtgrtggcggscgcctgtaatcccagctactcgggaagcttgagacagaagaatcgtttgaatccgagaggcggaggttgcagtgagccgggatcgcgccattgcactccagctcgggcggcagtgcgagactccgtctcaaaaaggaatgacccgggtcgcatggggtgaagggtcgggaagcgccccaaaaggagaacggggctgggctccgggatccgtcggcgaggaaggggcgaaggggtggagggactcgggccaggccgccggggatgtctgtggttacctccaagctctggaggccttggcgagacccgcgccatccgcagcttggttcctgcgacctcagccgcagggcggtccggctccggtttcccagcaaccaggcgtcatccttcccagcaagcactgcgtccaacccgcgacgtcggaccacaaggcccagcatgccccgcgcggactacaagccccacaatgcaccgcacaccctttactggccggccccgcgctgctctcctaagaccccgcgggccagcgccgcgaccccttcccagcgctcctcgcgctgtgtgcggcgcgtcctctcgccggtgacccggtgtgcgtggggtcgaggcgccgggcggagtggctccgggccgaaacgccatgcggaggggcgagcgcagggacgccggaggtccgcggcccgagtccccggtgcccgcgggcagggcctcgctggaggagccgcctgacgggccgtctgccggccaagccaccgggccgggcgagggccgccgcagcaccgagtccgaggtctacgacgacggcaccaacaccttcttctggtgagggcagtgggcggccgcggggcggcgagggtgccctcgacctgggggttccggcaccgctggcctgggggtccccggcagcgccctctcgccgtcttggagtccaggactgtggccgggggtttgagggtgtggcagcaccgccccccgggtcccggggagcggccggaccgagctcccgacgccgggtcgggcggagggcggcgctgtaggtgggggagaccctgggcagaccctccctgcggccgctttgcgtctctctcgccgccctccccacccctgcccgccttggctctgaccgcgcggttctgcgatccagaccccttccccgccacccgcctccagcgtcaccccagaaacgctttctctgtcctgctgtcgaagcttcacctgtgtcccccgtcattctgcctgtggttgctcctcagtgcttgcggctgcacgaaatcatcttgtgtgtcgcgcccgaccccacgtggcgatcgtgttgattagcagagtgttgtgcgtgcttcaggaatgtagtcggtgttcgtcgaatccaggctctgtttctctcctcagttgcccctagcggggccagcgcctcctccctgcacaactcagccctagctacaccttggggtccccctgtccgccactctgcctttaatgggggtggaaaaggaagaggcccccgggagcagctggagtgtggcactctgtgtccagacaggctccaggtgccgctcctactcccgacagctgcgaccctgggctggccctttgccgatgctcctctgtgagaaggatcaagccgtcgacctgaaagcaggcttcgtgagaggagggtttggctcttcttgactgcaaggtgcccagttcccatcctgtggaaggcccgggggcacaggggcagtagaggtggggtcagccccaggaaaacgtgtgggagacaggcgcctgcggccagcagtggaaggaaggctttatggacgcttccaagagaaccatgctgtgggatggtcggagagcaaatctgaggggcgaggagggcctgatggaggagtaagggacttgtcaggggaaggcgccaccacagacagggacttaaccggtcctggcctgtcaccgcagccgaagctctggagagagactgtccaagtggtgggaaagcaggttagggtggaggaggccccacgcagggtcttccgtgaggtgtgggcagctgctgttgcagggagggcatccgagctctcctttggggagatgagtgtaccgggtggctgcggggccctcgggagggagaggagatggggtgcctgccacgtggaccctctggcttccgggccctgtggacatcaggcctctccatcaggtgccctgccacaccccttcaggctgtcctcccgcagcacagctggggaccaccggagtctctgaggtcctggagcaaggagaccagactggctcttctgaggtcccggagcaagaagaccagacgggctcctctgacatcccggagcaaggagaacagacgggctcctctgaggtcccggagcgaggagaccagactggctcttcttgtttctcatttggccgttcagcacattgtggggacccctactgcctgtcagttaccgttctacgggacatagcagagaactaaacaagaagcttagattctggtgcaggcatggaacttcagaaggctcaaaatgtgctggctgggtgctgagtgtggcaggagccagggggcacatgcaagcctgcgcagcccacccagtaccagggaagcaggagcagcagcccaaaggtaggagggggccggtctctttagaagcccagaccagtggtccctgcccacaaggggtgtttgggacacagacggctgggcgcagcagagcttgcctgtcaggaggccaagggggtcaggagggctctccaggagcgggtgcagcggggctggctggtccaggtacctccttcctgggtcttctgggtgggtggctctggctctggctttcccctcgaccctgtccctgtagagacgcatggggcaggttcttgctgtgcctcctcccttccctgtgcagaggaaggagcttcacgcttctgggtggcaggtaactcaatgcctgcctggtgagaattcattacctgcagagcctcacactgacctcctgagtccacctgcactgacttgctgtgctggcatttttttaactctaattttgtgttttagagagttttactttttattttttattcatttttatttatttatttatttttaatagagggtccccctgtgttgcccaggctggtcttcaactcctggcctcaagtgatccttccgcctcagcctcccagattgctgagattacaggcatgcaccaccacatccagccagggcgttcattttcaaggatgggtgcacttcctcgggccagtgacggcggccatgtgtgaattttgtttctctgtgactgcttgtcagccatagggatagggcgtgcggttcgattcagggcttgactggccctgggagcacgaggctgagctctccttctctggattcattcagggtagcaaggacaattatggggaacatccagaggaaaacgtttagatccacagactccgagaagccctgtgcgaagatgtggcagctcatgcggtctggaaattgtttgggagaacacttggggaccccttaccctggcgaggtgcctgtgaacgttgccgcctgtctgtgggagacgctgaagcagcttcggatgaccacacttgctaaccagttcccgagctgggggccactgtgatgttctgagagtttttattgtatgcttgtgtcttggaatggggtgcctcaaatgagccttctcagtgacctgaggactttatgtgtgaggtgacctctgaccttcagataccccaggtttctggaagatgcctttctccatcatcctggatcggggctttcccagctttgcctacacctgggaggcgcgagtagccagatgaagtctttctggtcttgctggtcagagccagaagggccagtgcccggtccaggagcctctcgcaggccttgggctgcccatccaggcgtggcctttccttggccctttggacgacgacgccgcgttttcctcttggtctcggcctccctgcccaccatgagagtggacatgagagtgaccatctccaaggaggcagctgggtcttttccactccccatggcagggagccagctgtcttcacgccctcaccctagtgaagtggctgaattgccaggattgatcacagctctgttctgtgtctgatcacaggacatacaccgtcctgcagagtctgcargcgggtgggaggagccattgaacagacctggcgtcctgggagggacacggaattcttcccttgagagtctcatgctatcttgagcggcactctgtcacttccaagatgtgtagacgtcgtgctgcgtgtaggacaaggactggagctcactaatacggaccttactttccaggagcgttggatttgagcagctctgagatgtgtcctcctgcagggctgctgtgcctggtgccctttctctgggtcccttaccctctgcctcccttcctgttgggtcctcttcattcccatttctgcttccccagggccaggagggtgctgggcactcggtggccacctcaatgacagtgtgcacatttacctgaaggggcgaagggttacctttatatttcaggtaatctctgtgttttggggaaatggaaagatggtgttgggttagggttgatcaatgatcagcgtttccctgggctacacaaggagtgagtgttgggttggtggccactttagaaaccacaggaaggtctctgtcgtggaaagtcgtattaaaggagtcaagttttacgcctgtaatcccagcactttgggaggccgaggcaggtggatcacgaggtcaggagtttaagaccagcctggccaatatggtgaaacccggtctctactaaaaatacaaaaattagctgggtgtggtggcgggcgcctgtaatcccagctgctcgggaggctgaggcaggagaatcgcttgaacctgggaggcagagatcgcgccagtgtcctccagcctgggtgacagagcaagactccatctcaaaaagaaaaaaagaagtcaagtttcaattttaacttgtgttagtgtgtgatcctgtctttgtgtgctgtggaacttggtgctggtgggacacaggctgctcaccccatcccttgagctttgcgtttattcctgggattctgcatgtgaatgggagcctgtgctgtatctgggagatgctgactgggttgcrggcacgtccgagggtcagggtggggccragtgcagcctcctcctccagtgggcctgtgtgtggagtggtggcattctgggtgtccctgaggcctggtcgtttccatcttcttcctgagcccacatggagatgacgaggggtttcctgctggtctcttgcagaacagggttgagtggtgtcctcacgttgatctagcttctgggtctcccattctgcatgtgagcaggttgatgggctgttgtctcttccacggttagcctcccttaggctggggctccttcacccctcttttcttagagacattactgcccagagtgagaacccctcacgtggggtggccgtgtggttccaagacagggtcctgtggaggccctgttagcttccccactggaggcctccctcacagcaggctcctgtcccggcatctgcactccagccaggcagagtcctgctcccgtgcacaccacaccctgtctgtctgtgctgtgggcccttggcggggttctgggtgtctggagccccttgaccttgttcctcctacaaggtgacctcgtcaggaagccccaggatgagactgtccctggctcctccaaaggtcacttcagacatgtgcaccctttggagaggtccctgctgtttctcagaactgctggggatggaggctgagcccgagagtgcttgctcctcgcgctcccttcttgctatggtctccggagatgcctcccaggccacgagccctcctggcgtggttttactgggacctggctttgcaacaaaaatagttgttttaacctccctaaccactcccatccctcttttgtttttctctataacgtgtagggtttcttagctctcctgtattggtctcactccactggaaggaaggctcaggaacgcaggctgtgtcttctcccgggtgtggctggggcgggggctcagggaatggctgtgatggcccagtgtccaggaggctccgggccccaccccccgccttgctgcatgaccttcacagtgtcacttaccggccctgacttgcctgcgggcaccacgcacacggcatgaaggtgccctggcccggggcacggacacagccagagccaccgcgctcctggctgtcatcacgtcgttggctttgcgatctaaacctgcttgttgttttggtttttctttctttctgttttctttcattctttttttttttttttttttgagacagaatctcactctgtcacccaggctggagtgcagggatgtgatctcagcttactgcggtccccgactcctgggccgaagtaatctcccctcaccctccctcttcccaagtagctgggaccagacatgcgccaccacatccagttaatttttttttttttttggtagaaatagggtctcactatgtttcccgagctggtctccaactcctgggctcaagtgatcctcctgcctcagcctcccaaagctctggaattacaggtgtgagccacggtacctgcccccaaacactcctgactcttcttatcctaaccggggtcatcttactctcctcaccgaaatctgatgtcacctgtatggaggaaagggtgggcctcatggaggggcaggccagggacaaggggactcctgggccccagctgagcccagcccgtttcccctcaagggctgtctccaggaggacacgttctgtaagtgtagtgttcagcagagggtgagtttctgggtcgccgaatccaggcacccttaggaatgggggcctaagagggccttctgacgtgggttctctgctgtgattgtgggcaggtctctcagtactgaagggccccacggtgtggagctcagcaggaaggctgaggttccctgcggtttcctcatggcttaggactcaaatgcaaatgtatctaaagaaaaaggtggttgatagtcacaatgaaacttttatttacctctggttgtcttaaatgcctagtattgtaaaatatggcagaagaattcactttcatgcctgtaatcccaacactttgggaggccaaggtgggcagatcccttgagttcatgagtttgagaccagcctggaaaacatggcaagaccccgtctctacaaaaaatacaaaaaaatccaacctgacccacatggcaagaccccatctgcacaaaaaatacagaaagttccagcctggagcctccacctgcagtcctgcagctccaccctggctcttcatgaaatcggctaagtccaggtgtgggtgcgttcagtgcagcacccacgtgcaggtgacacgcccatgcaccgccacaaccacgctcacaccagaacattccatcatccggaaggcccgtgtctccgctccagtctgcttttcgtggatgcaaactcatttccttgagtcgtgtgtgggtgacagcagatgggaggtttcttttgtgcctggcgtctgtagcgtgtttttctttttctttttttatcttttgagacgggatctcacgatgttcatgatgttgccccggctggtcttgagctcctggcccaaaacagtcctcctgcctgggcctcccaaggggcgtgtctttgagatctatccacgttgaggtcgttgccagcagcacattcctctgagtgctgagccatgctccgctggtcggagggaccacagtgtttcctccactgatagagttttggtttgtttcccgttttaggttattatacctgaaacatctgcatgtaagtctttgactggacctgtgttttcatctgtctcaggcccacgtttgggagtgtgtctttgactggacctgtgttttcatctgtctcaggcccacgtttgggagtatgtggctggctggatagcagacgtagcataggcctcacttttctgtgccgttttgcagtcccacctgcagtgygtgagcatcttgctccgagacctcaccagcactctgcattgtgatgttcttaatttcagccgttccagcagatgtgcactgatgctgtgtcgtggcttggatttgtgatgcttttaatttcagccgttccagcggatgtgtactgatgtgtcctggcttggatttgctttcacggtgaccagtgctgctcctcgtttgttcatgtgcttattggccatttgtatgttttccttgtgaagtgtctgttcaattttttgcctattttttcattaaattgtttattgagctgtatgagttctttataaattctggataaaaagtattttttttcttttttttttttgagattgagtctcgctctgtcgcccaggctggagtgcagtggygcgatctcggctcactgcaggctccgcctcccgggttcacgccattctcctgcctcagcctcccgagtagctgggactacaggcgcccacccaccacacccggctaattttttgtatttttagtagagatggggtttcaccgtgttagccaggatggtctcgatctcctgacctcstgatccgcccgcctcggcctcccaaagtgctgggattataggcgtgagccaccgcgcctggcctgatttttttttttttttttttttttgagacagatcttgctctgtctcccaggctagagtgcagtggcacaatcatcctagcgcactgcarcctcaacctgggcttaagcgaatctgccacctcccgagtagctgggactacaggtgcctgccaccacgcctggctaattttttatagagatggggtctcactgtgttacccagtctggtcctgaacgcctgggctcaagcaatcctcttgtctcagcctcccaaagcgttgggactacagacgcgtgcagcctacaaagttttatcagatatatgtattgtgaatattttctcccagtttgtgacttgccttttcatttctttagggcacaaatagtttacatttcatggaggcaagtcctgggcaacatgctttaagtgcattgttcacttaattttcatgatgtccttggaagtcagaagcttccccatttagatatgaggaaactgaggcacggaggggtgcatcatctctccaaggacacactccagtggatgtaggacctgggttagacgtgaggacacactccggtgaatgtaggacctgggttagacgtgaggggacactccggtggatgtcggacctgggttagacgtgaggacacactccggtggatgtcggacctgggttagacgtgaggacacactccggtggatgtcggacctgggttagacgtgaggacacactccggtggatgtcggacctgggttagacgtgaggacacactccggtggatgtcggacctgggttagacgtgaggacacactccggtggatgtcggacctgggttagacgtgaggacacactccggtggatgtaggacctgggttagacgtgaggacacactccagtggatgtaggacctgggttagacgtgaggacacactccggtggatgtcggacctgggttagacgtgaggacacactccggtggatgtaggacctgggttagacgtgaggacacactctggtggatgtaggacctgggttagacatgaggaaactgaggcacagaggggtgcatcatctctccgagsacacactccgatggatgtaggaactaggtctctgcctccatttgcagatggtcatgcagagggggtctcaggcgagtgtctggcacaggcagtggctggggtctggtggcccccagttctgatactaggctggttgtgggcttttccaccagcgatgggacaggacaagactgcaaagggagcgccctgcctcctcctcccacgtctgggctctgacaggccagaggacgggcagacccacggctcgtggctcactccagctagcagcggtcactctgcaggcctctgctcaggccccttctcagctcttggtgtcttgggctgctgcactgaatctcagatgttatttcatgaacccaaagagttgttgtctcggcttgtcttgcgcagtgaaaagcgcgtgttttacgtgtccagttgctcttaatagcagatacctgccctggacgccagtggcagcatgtgccctctgagcagcggccttcagcttcccaggaacacggggctcttcctgtccagcctcctgggggctggtctcagccctgactggccagcagacgcagggtcatctcggagttacccagctagggactcgcagccagttgctggttgggagttggagagtggagtttaagccctctccttgacgtagagaggatttggggcctgttacgtgagtatttagcaatgctgcccaagctctgacaccatgcttatgcgtttttggatttcaggcgagcccacaccttaaccgtgctcttcatcctcacctgtacgcttggctatgtgacgctgctggaggaaacacctcaggacacggcctacaacaccaagaggtaagctgccctctygtcctgccttctgaaactgccctgtgccccgtgtgktgggtgtggcacccttactgctcgggctgccgggggctcagaaggccttcaccagagggctgcgtggggccgccggcctctcccttgagtgtgtctgatgtgcagactccagggctgcccttggtgctgcgtggcgttcccggtcagcccccgtcgcctgtcactgggagccaggagtctgtgtcatctccacgtgaccggcagcctgtgctgcgtttcctctgagttttgcatgttgaggttggaacgagctgcagcagctacagggctgagcccttgagtttgggcgtctccgggggtgaggttcctgcggtggccgcgtgctggttccgttagccagcggggctcttgcacggacaggggccgacacggaccgcagaccatctggtcagcagccaagcgagtaaactcgtcttctcaggtttrtctccacaggcaggcaggctagaccttgggtgtgtcctctgcctgaattccatggattctgacgccagtctcagaagtgcgtgtggaagagaagctggttttagagcctgtgaatcagtcttgagttttctgtgcctgactctcctctcgcgttgctcttccgacgcgcgcacagggtgtgtctgcccagggctgcctcctgcccagcaaggctgctgacaccatcagggcctggccccacttgctccggcgggatggtgggaggaagccggagcagggtctgagaccagcagcaggatggggacagaggtggaaggaggcattggaggcctgttggtgtcggggccacaagttggctctggttggcgggagccctggggtttgtaggacttagctgtccctacagctcttgggccagcacttcattttgtaaagcaagagtctcgctatcttcgtgactgttgggtggggtgatgggtgggcatggtgtgaacgtcatcacgcttgcacgggcgttggtggccctgtttgcccactgatttgacaccagccctgtgggctctagaacacaagcatgcccagtgccctgtctgtaggggagcggatgctttagaatcacgcacagcagacctcataactgagtccatctccctgggggcagtggggcatttctggttagaaattactgttgaggtgcctggacccaggactctgcagcctgctccccagatgagctcaccctccatcctcacctgggaggcgcaggtggcctctcctgtcctggtctccctaccctgctcctggctgcatgctctgtgggttctctcccaccttgctgtcatccctctcccagtcagctttgctggcccttccccctttttctgagcctgaggtgccagcttgctcccaggcctggcctggccagtgcctcccgtgctccaggcccagctcgctccttctccctttcttaggcagtcccagcgggggtcacgtgcagaacctgcaggcccggtgtgcactgtgtaactaggctccagaaatagatgagggagcatgtgccgtgcctggggcccctgtggaggggccacctggggacgctggacctgtggctctggaggcagtgaggcagtgggcaggagccccgtgtgtgcctagagggagctttcaaggaggacttggtctttcttgaattcatccatcagcacctggctaggagggtctgtggcatctgccgggcacagcagggtaggtggattaggaagcaggaccgggtctcacctcaagtgtcccacatggcaagaattgtcaagagcaggagtgcagggggtgtcttgggagcrctccccgaaagcattcaccaggcccccaccaggcgcatcacaaagcctcaccaccccaagccaggccctgccctcccaggcctggttcctatgggaagcactaggtgacccagacccagaggggccaggagcttagacccctgagggggcagcagtggtgggcacgtcccccacttcacccagcactggcctctcctgagtggcccccgacgtgagaggctgggttctgccatcctgtcctctccagcagggagcccctgcgtgtgttcattgagaggggccaggagacgggaattcacggggccctgggcactcttctctgaggttctgttctggggacactaaacgcgctcccaactcacattctctttccccctcaccctctttgagggcacaaaagaagccacctgtccttctctgctgctggcacctagaacctgctctgggctccttcctggaaggctcggctgccccaggtcaccctggcactgaccgtggctctgtggctccttccagtgaaattgccgtggtgcacctgtcctgagtccattctcatggcctggacccgcactgctgcayaccagaagcccagctcctgggcagccaccctacctgcccctacgcagggtgtccacacagagggtgtccgcacacagggtgcccacacacagggtgtccccacacagggtgtccagaaggctgtgggggctggtttacttttaatactagaattatctgatgtcctcaagggtagattttcttatatagaaaataccttctaggccaggcgcggtggctcacgcctgtcatcccagcacttgggaggctgaggcgggcannnnnnnnnnnnnnnnnnnnnnnnnnnnnnnnnnnnnnnnnnnnnnnnnnnnnatggagtctcgctctgtaccccaggctggagtgcagtggtgtgatctcggctcaccgcaagctccgtctcccgggttcacgccattctcctgcctcagcctcccgagtagctgggaatacagggcccaccaccatgcccagacagtttttgtatttttagtggagacggggtttcaccgtgttagccaggttggaattttttttttttttttggtcaatgttgaccaggttggcctcgaacgtgtagcctcgcctccccaagcgccagaacaaacagcctgagccactgcagctcccagccttatttttttgttttcagacagactctcgctctgttgtccaggctggagtgcagtggcacaatcctggttcgctgcaggctccacctcccgggttcccgccattctcctgcctcagcctcccgagtagctgggactacaggtgcccgccaccatgcccggttaattttttgtatttttagtagagacggggtttcaccgtgttagccaggatggtctcgatctcctgacttcgtgatccgcccgcctcagcctcccaaagtgctgggattacaggcrtgagccaccatgcctggccagccttatttttaaaaattaatatttatgttattaaagttaaaaagttataaaactagtgtgtctttattcagcttgctgtcattgttctttttatggatctaacaggttccccaccttaggggatgattttctttttcttttttttttctttttttggagacagggtcgtgctctgttgcccaggctggagtgcagtggcgtgatggcccactgcaaccttcacctcccaggttcaatcagttcttgtgcctcatcctctgtggtagctgggactatagccgtgcaccgccacgccccactaatttttttatattttggtagagacaggtttcaccatgttgcccaggctggttttgaactcctgagcacagacagtacacccgcctcagcctcccaaattgctaggattacaggcgtgagccactgcgcccggccccgttttgyttttcttgagtcaacgttattgacctataatttactataatctgtgtctgattcacgcgtacggctgatgagttttaacagactcagagccccgtgtgcccaccactgcatgggggtgcgaaagtgttcactgttccctgcgctcagagtgcctcaccccggctcgggcagtgcggaggcatctcccctgcgctcagagtgcctcaccccggctcgggcagtgccagtgcatctgcctgggtgagagcagggtctgtgctgccggccccggcttcctgtgaacgcagttgctcctccggcctggcctctcccgctggagggcagcttcgcggcatccttgctgtgcctgccggtgggctcactggggagcttccgytgcgtggacacggcaccgttcactgatctgcctgtatgggggtgaccctgggggagagtccagctttcctcaccagtccattacatttttatcccattttaaacttagtaaattaaacctcttcacacattttactcaataaaatacatgtaacatatataaatgtaatacacttaaaatataaatatccttacttgtaatacatataaaacataatgcatataaatatactcacagtgctgaagaataacaaagttggacacagaaactacacaatttcaagacttcctgtcaaaaatgcaccgaaataccgagcccagaaacaggcgcgcacgactgcaggcagccgatccttgacaaaggaacaaaggcaagtccatggcgaagggatggccttttcaacactggcgctagagcaacagaacatccacgtgcaaatctagacacagacctgacacttctcacaaaacctaattctaaatggattctagataagcctaaatgtgaaatgagaagctataaaacttctctttttgtttttgagacagggtcttgctctgtcacccacactggagtgcagtggcgcagtcacagctcactgtagcctccaactcctggcctccagcaatcctcctgcctcagcctcccaaggagctaggactaccggtgtgcaccaccacacccagctactttttaaaattttttgtagagataaagtctcactgtgttgcccaggctggtctcaaacccctgctttggcctcccaaactgctgggattacagatgtgagctatcatgcccaggcataattataaaacatctgagctatcatgctcagccacaattataaaacatcttggagaaatcacaggagaaagtatagtgaccttgggtttggtgataataaaataccagtagcacaatccatgaaaataaaaacttgatcaattggacttcattacaattaaaattgtctgctgggtgtggtggttcatgcccttaatcctagcactttggaaggccaatctaggaggattgcttgaggtcacaagtttgagaccagcctgggcaacatagtgaggaccaccccccccccatctctactaaaaattaggaaaagataaattggctaattgtggtagtacatgcctgtggttccaggtactcaggagaccgaggcgagaggattgcttgaacccaggaggtctaggctgcagtgagctatggtagcaccactgcactccagcctaggcgacagagtgagaccttgaaaaaattaaaatttctgctttgtaaaagacactgttaagggaacgaaaaggtgagccacaagctgttgaaaatgtttacaaaacacctatctgwtaaagtacttgtattcaaaatatgcaaagaactcttaaagctcaagaagaagaaaaacaggctgggcagggtggctcacacttgtaatcccagcactttgggaggttgaggcagaaggattgcttgaggccaagaattccagaccagcctgtgtaacatggtctattagtctgttttcatactgctataaagaaatacccaagactgggtaatttacaaaagaaagaggttcatcgactcacagttccgaattgctggggaggcctcaggaaacgtacaatcactgtggaaggcaaaaggggaagcaggcaccttcctcacaaaggcggcaggagagactgagaacgggcacaggaaaaactgccactcttttttttttttttttttttttgagacagagtattgctctgttgcccaggctggagtgcagtggcacgatcttggggctcactgcaacctccgcttcctgggttcaagcgaatctcctgcttcagcctcccgagtagctgggactacaggcatgcgccacctcgcctggctaatttttgtattttttaatagagacgaggtttcaccatgttggccaggttggtctgaaactcctggcctcaagtgatccgcccacctcggcctcccaaagtgctgagattacaggtgtgagccaccgcgcacggccaaaactgccgcttctaaaaccatcagctctcgtgagactccctcactacatgagaacagcatgggggaaccgcccccataacccagtcacttccctccctccacacgtggggattacaattcaagatgagatttgggtggggacacagcgaaaccgtgtcacatggcaaaaccccgtctctacaaaaaatacaaaaattagccaggcgtggtggtgcacacctgcagttccagctactcaggagtctgaggtgggaggatcccttgagcccgggaggtcaaggctgcagtgagccaagatcacaccactgcactccagcctaggcaacagagcaagaccctctctttcaaacacaaacctgggtgacacccactcggaaggctaaggcaggagaatcacttgaacccaggaggcagaagttgcagtgagctgagatggcaccactgtactccagcctgggcaacagagcgacaccctgtctcaaaaaaaaaaaaaaaaaagaaatgaagtactacaaataaagtgagccgtcaccacagctgaatataaggcctcaccgtaggtgaccgcagggacatggccagctgtggtgacagcactctcacggaggatgtgttataaaaggctgtccccatcacgacaagaggaaacacaggagccggcgtgaacaccagctgtctcaccagatctgtcttccaggtcttcctcctcagacgccccctcgtcttctccgtctgtgccatctccatgctcgctgtcactgtcgtccccagagtccccactgctgccccacgctgctttcttctagacaccagggtgagacacaggccgcagggcggcgtcaagaccatgcagcagagagcaggttgctttgcacaggcatagaggcgtcaggagcacctnnnnnnnnnnnnnnnnnnnncaggaactggaaacagggagacgccactgcatacccgacggagcagctaaaaccttaaaaaccgacagtaccaacgcttccaggaactctcacccattgctggtgggaatacaaaaggctaaagccgctttagaagacagtttcacagactctcacagaactaaatataaatatattcttgggctggacgtggtggttcacgcctgtcatcccagcactttgggaggctgaggcaggtggatcacgaggtcaggagatcaagacaagcctagccaacatagtgaaaccccgtctctactaaaaatgcaaaaaattagcctggcatggtggcaggcacctataatcccagctactcgggaggccaggaggcggaggttgcagtgagccgagatcgmaacattgcactccagcccgggcaacagtgcgagactctgtctcaaaaaatatagatatagatatagatagatagatagattcttaccatgcaatctagcagttttgctcctgaatatttatccaactgaattgaaaacttatgtccacataaaaacctgcatgcaggccaggcatggtggctcacgcttataatcccagcagtttgggaggctgaggcaggaggatcgcttgagcccaggagttcaagaccagcctgggcaacatactgagaccccatctctaccaaactaaaaaacttagccgagtgtcacagcacacacacatggtcccacctgtcaagaggctgagtgggatctcaagcccggaaggcagaggttgcagcgagctgtgattgagccactgcactgcagcctgggcaacagggtgagaccccatctctaaaagatagtaatgagcattaagccactgcgaccgggaggaaccttaaatacatgtttctataaatacacattcctaagtgagaggagccagttgagaaggccgcgcactgtgatttcagctcgatgaccttctggaagaggcaatatgatgtggtagtgaaaacatcagttgtttcccggggaaaggggagagtggatagtagaatgcagcattcgtatggcagtgaggccactctgtgtggcaccatcctggttggtacatgacactgcgtttgtccgaacctgtagaactggacaacacgagcagaccgtgtgcagattttaaacattcattgaggagatgggggtcccggcggggaaggccgactgacaagaatcttaactactgcagatgcattccgtgaccttcctgaagggtgttcagaggaaggtgctgagtaactttggaaatgagcagtgtctataaggccagaggcaaaaggaatggcacagacgctgctctagtcgataaagttttgctgcacagaggtgctgactggcagctctgtcactgtggtgtgtatgatggctgtgggaggggagtctctggataatcagagaaggaggggagtctctgggtaatcagagggaggaggaggggagtctctgggtaattggaggaggggagtctctgggtaatcggaggaggggagtctgggtaatcggaggaggggagtctctgagatggaggggagtctctgaataattggagaaggaggggagtctctgggtaatcggagggaggaggggagtctctgggtaatcggagaaagaggggagtctctgggtaatcggagggaggaggaggggagtctctgggtaatcggaaggaggaggaggggagtctctgggtaatcggaaggaggaggagggcagtctctgggtaatcagagggaggaggaggggagtctctgggtaatcggagggaggaggaggggagtctctgggtaatcggaaggaggaggaggggagtctctgggtaattggaaggaggaggagggcagtctctgggtaatcagagggaggaggaggggagtctctgggtaatcggaaggaggaggagaggagtctctgggtaatcggaaggaggaggagggcagtctctgggtaatcggagggaggaggaggggagtctctgggtaatcggagggaggaggagggcagtctctgggtaatcggagggaggaggaggggagtctctgggtaatcggagggaggaggaggggagtctccgggggagtctctgggtactcggaggaggagggcagtctctgggtaatcggagggaggaggagggcagtctctgggtaatcggagggaggaggaggggagtctctgggtaatcggagggaggaggaggggagtctccgggtaatcagagggacgagggttggagtggccgctgtgattggtgggtttaccattgcacgtttagcccagaaaagacaaagatggttaaacagtgtgtgcgcagtggttaatggatacacacagatctgttgctgtacaagcttgagggggcctagaaccagctatgccttgcagcagtgaagcacacccagggcccaagattccctgggtccctaatgggcccttacaagtccaacgggggcccagggggcttcttgaagggagaaaaatgggcctggaatttcccaagcaccccggggggccagggaaaaatgggcccccaggaatccaagccttggaaacccttgggcaaggtttctccacgaaaaaggtggaaggggaagctttcttggtaaaaaaccaaaaaaaccccccccaccagaggtccaccgggggaatatgggcggtctccccccagatgggaaaaaggagagccccttcccccaatggggggcgcaaaagggagaggccacccccaaaaaatttaattttaaggggtggggttttttaagaaaattttttaaccccccagcgaggttggggaaaaaattaaaaacccttttcccacggagagccccccatttaaagggaataattataggggggatatgggggggtaaaaataaaaaccggggagggggaacacaaaggaaaccaaaccccttttccttgtggggaaaagaggttttttcggttaaatagggaggggaaaaaacccccccctttttccaagaaaacttggcggggaaactctcccgggcaaccccttgtgggccctgtcccgtgggggaaacctgacctcccttttcttggcgggggccaaaccccaaagggcccctgggaaggaagannnnnnnnnnnnnnnnnnnncctggttggtacatgacactgcgtttgtccgaacctgtagaactggacaacacgagcagaccgtgtgcagattttaaacattcattgaggagatgggggtcccggcggggaaggccgactgacaagaatcttaactactgcagatgcattccgtgaccttcctgaagggtgttcagaggaaggtgctgagtaactttggaaatgagcagtgtctataaggccagaggcaaaaggaatggcacagacgctgctctagtcgataaagttttgctgcacagaggtgctgactggcagctctgtcactgtggtgtgtatgatggctgtgggaggggagtctctggataatcagagaaggaggggagtctctgggtaatcagagggaggaggaggggagtctctgggtaattggaggaggggagtctctgggtaatcggaggaggaggaggggagtctctgggtaattggaaggaggaggaggggagtctctgaataatcagagggagaaggaggggagtctctgggtaatcggagggaggaggggagtctctgggtaatcggagaaagaggggagtctctgggtaatcggagggaggaggaggggagtctctgggtaatcggagggaggaggagggcagtctctgggtaatcggagggaggaggaggggagtctctgggtaatcggagggaggaggaggggagtctccgggggagtctctgggtactcggaggaggagggcagtctctgggtaatcggagggaggaggagggcagtctctgggtaatcggagggaggaggaggggagtctctgggtaatcggagggaggaggaggggagtctccgggtaatcagagggacgagsttggagtggccgctgtgatggtggattaccattgcacgtttagcccagaagagacaaagatggttaaacagtgtgtgcgcagtggttaatggatacacacagatcttgttgctgtacaagctgagggggcctagaaccagctatgcttgcagcagtgagcacacccaggcccagatcctggttcctagtgccctccagtccacggggccagggctctgaggagaaatggctgattccagcaccggggcaggaaatgcccaggatcagctgatcctggcagttccagaaagtgaggagctctgtaaacaaaaccccacagtcacgggattgcgtcccagtgaaagagcctcccagtggccaaagagcaacaaaataataaagtagtattagaatataacccagagtagaaaataaacatccacgagcccatagtgatataagtgattgagtaaataaacagagggaacaagaccaaccttccctgcagaaggttttcagtaaatgaggtagatccccccattccaggagctggcgtgagctcccggcaccgctgtgcgctgcgcgtggtgacctgacctccttcctgggcgtgcagcacggagagggcagtgggaggaggacgctgcagccgaggtgcccgcagacacccccaagcccagtggtcaggtcagcatgcactggtcatgttcatggcgtggccgacggggaggctgctgccccatcctcccaaccccgacgaccccagcccggccatgcagaggcatagtcgaccrtctcactaaggaacattccacagaattcctgaccaggcctcctccaaaccatccaggtcatcagagacaaggagagtctgagaaaccgtcccagcctcggggagcctgaagagacagaacgagtagatgccatgtggcttccaggaagagattgttgggggcggggcagggggaaggacatcaggggagagcgaaggaagtgtaggcctcagcagctgtgtggcagcactggcttatttattttttattttttatgtttattttattttattttttgagacagagtatcactgtgtcacccaggctggagtgtagtggcgtgatctcggctcactgcaacctccgcctctcgggttcaagtgattctcctgcctcagcctcccgagtagctgggattacaggtgcctgccaccacatctggctaatttgtgtatttttagtagagatggggtttcaccatgttggtcaggctggtctcgaactcctgaccttgtgatccgcctgcctcagcctcccaaagtgctgggattacaggcgtgagccaccgcacccagccagcaccggcttattaatggtgagatgttaatgggaaaactgggcctgtgagatatgggagcttttactatttttayaataattctgtaaatctaaaaccattctaaaattaaaaatttatttttaaaatgcaatatatttgttttccttttaaagcacttccctcattcttacccaacgggacacaccttctcaagtacttaagtaattcttttttttttttttttttgagactgagtcttgctgtcacccaggctggagtgcagtggcgcgatctcagctcactgcaacctctacctcccagattcaagtgattctcctacttcagcctcccgagtagctgggattacaggcgtctgccaccacacctggctaatttcttatatttttagtagagacaggagtttcatgtcggccaggctggtctcgaactcctgacctttaatgatccacctacctcagcctcccaaagtgctaagattacaggtgtgaaccactgtgcccggcaagtaattcttatgaacaaattagccttataaagttgtcataaacattatgtgatgtgtggccaggttagagtcctgtgtgacccggtctgagctggcctctgggcagcatgccgtgtgggggctgccacaagctgattcagggagcaccggcctggggtgacgcacgcctgtcgggcggagggcggcctggggtgacacggatggtggcctgggatgacacgcgcctgtcaggcggagggcggcctggggtgacrcgcacctgtctggtggatggcggcctggggtgacgcgcrcctgtcgggcrgatggtggcctggggtgacgtggatggcggcctggggtgacgcagatggtggcctggggtgacgcggatggcggcctggggtgacgcagatggtggcctggggtgacgtggatggcggcctggggtgacgcggatggtggcctggggtgacgcggatggtggcctggggtgacgcgcacctgtctggtggatggcggcctggggtgacgcgcacctgtcgggcagatggtggcctggggtgacgtggatggcggcctggggtgatgcagatggcggcctggggtgacgcggatggcggcctggggtgacgcggatggcggcctggggtgatgcgcgcctgtcgggcggatggtggcctggggtaacgcggatggcggcctggggtgacacagatggtagcctggggtgacgcggatggcggcctggggtgacgtgcgcctgcaccgggagcagcttcccttggccagtgcccatgttcctcttttcatttttatcttttctggggagggtagggggacgttttactgtctttccactgaatgttatgaccctccccacgccccttggaggcacagctgaggtggggcctatgtctggctccagggggccctgaaaggtactttttacacctcccacccctcagcactgagagacctcgggaggggtaccggtgacagggacgcgggccccaccttgctgaacccagcagcgagggcatctctgcctctgtccctggaggctgacagcggtagtgtgggagctggggcctgggtggagaccgggtcagaaactcaggtttcgcctgggtgggccatgaatgtcctgccgagggtgagaccctcagggctctgggtggagagcagcacctgcccagaaccagtagacccttgtcccggctgcaccaggggccagcgaccttgtgccctcctccatcctgcaagcctcgggcggtgcttggcctcacctgcctctgtctactcaggactttgaggccaggcactcctgcaggcagagaggggaatttctgagactgaagttgttactgggtattttttaacagcgctgtcttaaaaaatagatagcgtgtctctgtggccccgtctattcttgcggccacacgaacgtgcgtgtgtgtgtgcagcttccctcacggcagccaaaacccagaggccgcccagcgtgcgaacacgccaaggtgtgactgtcggcacggcactgccgagccgtgggagggactgggtggtgcagcggccagtggatctcagaccctgagctgagcacgactggagaggatgggygcatccgagcgtctgcagagcacagagcgcgtccgcagagcgggtccacaccttgggtgcagcgagcggatgtgagcagtgtgcctgtgaccagggctgtctgcacatccgccggcctaagctgctgctcaccgaaacccactgggactctggctgaggccggccccaaggagctttgccgaggagggagcaccttgcccmtgcccagagcggtccctcgcatcctccttcccgtgaacctgcatctttggttgcagttacagctctcacgcttccatcttatgaatcacaggagtcccgttkgttttggatgakttgacaccaaaaagacacaggagctctctagagacacttcctgggggtcctgccgcgttggagcagggaggcagtagctcctgacgccttccctcctacgtgggctttgtgatcactgatggtcacatgcggggcattcggtggcctctgtgtagagccagtgtcttcctgatgtgacactgggaaccaccagcagcccaagcacagggaccttctcctggccactgggcgggctgcaaatgtgagggcgaatgttgggtgcagggtggtggaggtagctgggccttccctgccgcggaggaggcaaatgtgagcgcgaatgtccagcccagggtggtggaggtagctgggccttccctgccgcggaggcggcaaatgtgagggcgaatgtccggcccagggtggtggaggtagctgggctttccccgcggcggagtcgcccagctctgcccgaggccccttcctcccgccccagcatcaggggctgttccacaatgggtgtctgggggtccctgcagcctcccacctccctcctgggagaagcctgcacacactgaggggctgtttgttctttatttgcagaggtattgtggccagtattttggttttcttatgttttggagtcacacaagctaaagacgggccattttccagacctcatccaggtaacttgccatttccttttccgtgtgcccctgtggcatttctgttctgagcggccactctgtgtctgtgctgctgggtgtgagtgtcctgtcctcccctccgcctggcccctccccgaggcctccgaggccacttcccacatggacaagggcgtggggttctgagctggccgtgtgctcctcctccaaccaccgagggtctctccaggccttctctggccctttcactcttccctgtccagggctctccagcccttctcttcctgcttctgcctcctctttccacagaccagagtggccgagggctccagatggggctatgaggccgggggcaggtgggtgagggcaccagatggggctgtgaggccagggactgtgggctctaggtgggactctgagaccagagggggcgggggtgggtgagggcgccagatggggctgtgaggccatgggcgggtgggtgagggctccagatggggctgtgaggccatgggcgggtgggtgagggctccagatggagctgtgaggtgccgcccaccccctgcccttgaagtggttgcccagcgcactctgcctcagccaccaccccaccttatggccctgagttctaacaaaccctcgtgggccagagcatcccgccaatctcagtgtactctgtcccccaagtcccaccccaggaaggcgggctcaggcttctgtagggtcggttgtttcccctgagtggccacacgaagtaattagaaacattttctgtttcaacaggagtatgtattatagaaaatttcgaaaatacaaagatacttaaaaataaagctacccacaaataataaccactgttaaattttcacgtgtttgtgatacggacatattcacttgtttgtgtatacggacatattcacgtgtttgtgtgtgcggacatattcacacgttcgtgtacggacatattcacgcgtttatgatacggacataatcatgtctttgtgtatatggacatgttcacgcgtttgtgatacggacatattcacgagtttgtgtgatacggacatattcacgtgtttgtgtgatacggacattcacgcgtttgtgtgatatggacacattcacgtgtttgtgtgtgggacatattcacgcgtttgtgtgatacggacatattcacgcgtttgtgatacggacatattcacacgtttgtgtgatacggccatattcacgcgtttgtgatacggacatattcacacgtttgtgtgatgcggacatattcacgcgtttgtgtgatacggacatattcacgcgtttgtgatacggccatattcacgcgtttgtgtgatacggccatattcacgcgtttgtgtgatacggacattcacgcgtttgtgtgtaggacatattcacatatttgtgtgtatggacatattcacgcgtttgtratacagacatattcacgcatttgtgtgtacagacattcacgcgtttgtgtgatacggatatattcacgcatttgtgatacagacatattcacgcgtttgtgtgatacggccatattcacgtgtttgtgtgatacggacattcacgcgtttgtgtgtaggacatattcacgcgtttgtgtgtacagacatattcacagcctcgaaagagtggaatcctgaacacgtggctttgtgcattctccacttcaggttcaacgactttagtcatttccttactaatttttaaaatgactttaatcatttaggtttaaatgactttagtcatttccttactaattttttaacacccgaaattttaatgactgcttgtttgctgtcattagaatgtactacatttaactaacttatttaagccataatattgtatatttagagagtttccagttttattttaataaactaggctgtggtgaattttttcacgtatgctctgtgtaaatatctgattattcatttaataaaatgtcccagaagtgagtattgaattaaagggcatacacagtttaagcctgtgatatgtgttataaaattggcctccaggagagcagtgtctgccccagggtcagtgccatggtggtgagtgaagctcccccacccacagaggccctgagcagggagccgtccggtgacccaagcaggctggtcttgctggccccttccttgcccagggccttgagagagggctccttgagtgcctggcaggccactctgctggctgacagctgtgtgggaagggcccagggccctgtctgcccagccggctgagcacagacggtcttgcctccaaggggtttggattcctcagcagagccgtrgaaggtgcagtgatggtgagaaactgcccgtcacacagtgaaaagcctggcgccgtgacggtgagaaactgcccgtcacacagtgaaaggcctggcgcggtgatggtgagaaacttcccggcacacagtgaaaagcctggtgcagttacgtgcttgttgggtggatttggagggaagaaaagctgccggaagctcaacccatggccgtccttgcttggagatgcaccaaatccctcctgggtggcggcatcactggggactgggacgcagccgtgagtgggacagactggtcagcaggcagcagcttgtcctggcatgtgacccctggcacagggagagactcccgggagaccctcagctctgagcagtcaggagctctggcgcaggtcacctggcgggatgtggagcatctgggcctgaaggtcttggcgcttccaaaagctccggccgcggcgtctcttgagttgtggctcgtcccctcccactgggcaggactgggggttcctggggtgttcagtttttagtctgagctctgctctacctttcttctgtccgtttagtttgcttggcataaattccatattactttgccaatcttcgatttattgacggggaagcctgtcctggagccaccttcttccacgcgtcttgttaacttgggggccggcagggagccctcaacyctctgcagtcacaacacattgaagtggacaagtgatgagtcctgtgcagcggaggctctgggtggggggcagggagaagggctttctccagaaaggtggtccctgtgggctctgcccaccttcacactcccctgggtctggcccaggaatgcccagtccggcagctgtagccgtagccattagtgactgggcctcatgaggaggagtggaaatgggcccagcccggccatctggggtgctgctttctttggaaacttgagttggctgcagctctgagggaggtggaacgttctgggccactgaggagggcatccctcctgtgtgaacggcattttcttcctggctccctctgaaggctgtgtcagccacagcatttccagggctgctgaggctgcctgtctgtctttcccctctggtgtgatgtttagaaagacaaatgagtgctggggcctggggggtggccctggggtcagggaggtgctggagctgctccgggaagcgacccaggaatgcagaccaagggcctgctgggtattccggggcggcagcctggtgctggtcgggtgggaagcgtgagtggggagaggagtccgagatgccacctttctgatctggggagctggggccttccccaacaggagaaacatgagaaagattcgacttggyagtgcggggagggaagttagtactggtcgtggtgacctgtggcccgctcagaacatgatggtttcatgggtgtagctgtcccctcagagagcgcctgcaggccgggcacctgctccgaaggcgtccccttcagttggcgagcccttgtggggcgagggctgccccgagttaatttcaccacgagcccctcaaactcttgggccactgggaagtttccaggttcttcttatcccaaggcgtgaggaagaagtttgtgatctcagtcgtctgtcttgggtcccagacctccctgtgcagcttttcctaagaacgccagggcgtttgtatttcctgccaatgatggcggcttttcatgagccacgggggccgtcttcccctgagtacgtcggggcctcctgcgtttagtccgaaaacctcacgtctgcacgtcttgccgtgagctgctcggagccgtgggaagtcaggaattgagggatggtttcatgttagaagtctgttaatgtaactcatcacatcaacatgaaaaaattgatccccttaaatgcagaaaaacaaaaattcacattcatccatgacaaaaacttaacatactggaattgaaagatttttttaacatgataaaaagtatcctagcctgggcaacatgtcgaaaccctatctctacaaaaaaaaaaaaaatacaaaaattagctggatgtggtggcacgtacctgtggtcccagctactcaggaggctcaggtaggaggattgcttgagcccaggaggcagaggttgcartgcaacaagattgcactccagcctgggcaacagagccaggaccttgtctcaaaaaaaaaaagtggccagccacagtagctcacacctgtaatcccagcactttgggaggctgaggcgggtggaccatctgaggtcaggagttcgagaccagcctggccaacatggtgaaaccctgtcccgactgaaaatacaaaaattagccgggtgtgctggacacctgtgagcccagctactcgggaggctgaggcaggagaatcacttgaacctggaggtgaaggttgcagtgagctgagattgcaccactgcactccagcctgggcgacagactccatctaaaaaaaaaaggtatccaccaaaaacctactccaaacttaacggcgcaagtttagaagcatcactcgtaaacacaaggcagggatgtgtgctgactgcttctgtgcaacaatttatgggcaaaagatttgagtactggaatggaaaaaatgaagaaaaaaaattcacttttcagaragaaattgtgcctaattctgagttacagctttctttataaaggctctcccaggggcctgtgaagggcccagaagagacactgggtgtgaaggagccaggagccggcctggggctgagcggggccgtggaggcctggaccgggcgcactaacgttctgtcgtctgtctttgtagcttactggaggttttggctctgcgtgagtgtggtctacgagctgtttctcatctttatactcttccaggtaagctktttttctgggttggatacctgggaacttaggtgacagtgtggccccaggcatggtgacaaaggaggccttgcccacacagccctykagtgatgggaggaagcagggctagacccccacaaagtaggccgagctgcggggggtctccaggagcatctgtgcggcccttgagtgatggggggcagcaaagctagaccttcaaaacgtaggccgagctgcggggggcctccaggagcatctgctggtggggcgctgactgtggccatttagcagggccacacttaaggagggcagggccagtggtgcaggcacagaagagggcagggccagtggtgcagctgccagggtggctttgcccacagctgtcgtatctgagtgctggtggggactgggcgtgaagggagccgcaagtcaggtcctgcgatgcaggccagcgtctgcatggccggggcaaatctgggcctcagaggggaccccagcgccaagagggacggggtctttgtttttgtgttttgtggttgaccagtgtgactgtgtgtgcttcttccccatcctgaccacattctgcaagacgagcagggtgcaggtgggagacgcagctcctttgtaaatcctgggtcaggctgtgttgctgcygcaaatgcctactttattaatactctttgttctgtttaacttagtgtaaacacacatttttggggctgtcttcagcttacaaaggactttattattcccaatcttaaaactccatcagtgcatgatgagattttttatcatygtggcaaaattgacttttctgaggcagtgtacattctgtgaattttagcatttgtgtagacttctagaaacacaattagracgcacaagaattccactggccctaaaactcctttgtgttaccccttggtagtcatacccggccctgacccctgacagctggygagggttygcttctgtctcttctagaatggaatcgtggggtgggcagcctcttcccaccctgcacagtgcctctgaggttcacccaggatcatgcggtgggcagcctcttcccgccctgcacagtgcctctgaggttcacccaggatcatgcggtgtgcagcctcttcccgccctgcacagtgcctctgaggttcacccaggatcatgcggtgggcagcctcttcccgccctgcacagtgcctctgaggttcacccaggatcatgcggtgggcagcctcttcccgccctgcacagtgcctctgaggttcacccaggatcatgcggtgggcagcctcttcccgccctgcacagtgcctctgaggttcacccaggatcatgcggtgggcagcctcttcccgccctgcacagtgcctctgaggttcatccaggttgcatgtgtcttcctgcgctcctctttcttttactatttattttttgagacgacgtcttactctgtcacccaggctggagtgcagtggtgtgatctcagctcactgtagcctccacctcccgggttcaagtgattctcctgcctcagcctcccaagtagctgggattacaggcacctgccaccatgcgccactaatttattgtatttttagtttcatcttgttggccaggctggtcttgaactcctgacctcaaatgatccgcctgcattgacagggcacggtggctcatgcctgtaaacccagcactttgggaggctgaggtgggcggatcacaaggtcaggagatggagaccatcctggctaacacggtgaaaccccgtctctactgaaaaatactaaaaaattagccgggcgtggtggcgggcgcctgtagtcccagctgctcgggaggctgaggcaagtgaatggcctgaacccgggaggcagagcttgcagtgagccgagatcacgccactgcactccagcctgggcaacagagcgagactccgcctcaaaaaaaaaaaaaaaagatctgcctgccttggcctcccaaagtgcgggrattccaggtgtgagccaccacgcgcggcctgggctcctctttctcggcagtgacagtttctcaggccccttgtttttggtgagctggacggtttcgaggattggtcatgatctagtagaatatccctcaagtgacatttgcaattgggaagtgtgagttcacccagtttgttctttttcaagatggttttgaatcatctgggtctcttgcgtttccaaatgaatgtgagggtcaccctttccattcctgtgaaaagaacaggtggaattttttatggggattgcatcgaatctgcaagtctgttttgggagtagtgtcatcctgacaatattaactccgtcagtccttgaagatgggatggctttccatttatttaggtctttaatttcttccaacaatgtgttacagttttcagagtttaagttttgtacttcctttattacatttactccaattattttgttcattgtgtgctcttgtaagtggaactgttttaattttacttttgcattgctcgttactcatgtatggaaatgtagctcatttttgtgtactgatcttgcgtcctgcaaccgtgctgaactgattagctctaatagttgtggtgttttggggtagactcttaagaatattctatattcaagattatgtcatctacaaatagagatagttttacctgttcctttccaatctagatgtcttttatttcttttcttttttttttttttagactgagttttgctcttgttgcccaggctggagtgcagtggtgtgatcttggctcaccgcaacctccgcctcccaggttcaagcaattcccctgcctcagcctcccgagtagctgggattacaggcatgcaccaccatgcccagctaattttttttttttaatttttagtagagacagggtttctccatgttgaggctggtcttgaactcctgacctcaggtgatccgcccaccttggcctcccaaagtgctgggattatgggcatgagccaccgtgcccggccgatgtcttttacttctttgcgtagctgccctgcccagaacctccagctcaatgtttcctagaataggcaaggatgggctttttttttttttttttgagacggagtcttgctctgtcgcccaggctggagtgcagtggcacgatcttggcttactgcaagctccgcctcccaggttctagcgattctcgtgcctcaccctccgtagtagctgggattacaggaacatgctaccacacccgactaattttgtatttttagtagagtcggggtttcaccgtgttggccaggctggtctcagaactcctggtctcaagtgagccaccgcacctgactaattttttaactttctgtggagatgaggtttcgccatgttggccaggctggtctcaaactcctgagctcaagcggtctgacccctttggcctcccaaagtgctgggagtataagcatgagccactgtgcctggccagatggacattcttatctgattcctgatcttaggggaaaagcatccagtctttatcccactgagtgtgttagctgtgagtttttcatagatctccttaccgagtggagaaagttctgtgagttttttgtagatctccctaccgagtgcagaaagttctgtgagtttttcgtagatctccctaccgagtggagaaggttctgtgagtttttcgtagatctccctaccgagtggagaagtttctgtgagtttttcgtagatctccctaccgagtgcagaaagttctgtgagtttttcgtagatctccctaccgagtggagaaggttctgtgagtttttcgtagatctccctaccgagtgcagaaagttctgtgagtttttcgtagatctccctaccgagtgcagaaagttctgtgagtttttcgtagatctccctaccgagtggagaaggttctgtgagtttttcgtagatctccctactgaggggagaaggttctgtgagtttttcgtagatctcccttactgagtggagaaagttctagtatattcctagttggttgagtgtttttatcatgaaaagttgttagatttttgttaaatgatttttcgcatcaagtgagatgatcatatgggtgtttttccccctttgttaatatgatgaattacattgattgattttcttatcctgaaccaaccttacattcctgggataaatcctgctgggtcccagggtgtgcctttttacatactgctggacttgctttcctagcattttatctaagatttttgcatccatatttgtaagaggtactgtcctttaattttcctggaatgtcttgttctggctttggcaccagggtttgtgaggatgtctgacgttttctcagtatttgtctggggtgaaggcgcgcactggcaccatcaccatgacgtatccctggcgctgtggaccttgactgcctggcgagatgtgtctgtcaggctttccactgtcaatccatagtgcattctccacaaggaggtcactggtgcagcctgcatggagggaggggagtttcgttgccccccttggtgtgtggcgtctgcacgttgccaggaattcttgtgcatgggagagatcctgcttctctaccattagttattccatcatgtatttatttatatcagtgtggacgtacagatacttgtcttacacttgcatatttatttcagcgctgctctatttatcgtggtgcccaaattcttttgccaaaaggartttccacgtggttcctgtattgctttcacacaccctcacggagttcttggcttttcgttttgtttttctgaggacatcctgacttcctagcactgcgggatgctccaggctcctcctgtccactccccaccctggtcctggaatcagccccttctccaagagccttgggtccttactgaatattaggaactgaggcctgggtgttgggtgggctgcgtggtcctgggtgccatagctcacagaggacgggcatgtgtgcactcaytgtgtgtgcaggcgtctgtaaacacagccagtgcaggggtgcgtgtgtgctgtgtgcgcaggagagtgtaaacagtgcacgggcgcgtgtgtgctcactgcgcaggcatctgtaaatagtgcatgggcgtgtgtgctcactgcgcaggcatctgtaaacagtgcatgggcatgtgtgctcactgtgtgcacaggcgtctgtaaactgcacgggcgtgtgtgctgtgtgtgtgcaggcgagcgtaaacagtgcacggatgcgtgtgctcaccgtgtgcgcaggcgagtgtaagtgcacgggtgtgtgtgctgtgcgcaggcgagtgtaaactgcacgggcgcgtgtgctcacygtgtgcgcaggcgagtgtaaacagtgcacgggtgcgtgtgctcactgtgcgcaggcgtctgtaaacagtgcacgggcgtgtgtgtgctcactgcgcaggcgagtgtaaactgcacgggcgcgtgtgtgctcactgtgtgcgcaggcgagcgtaaactgcacgggcacgtgtgctcactgcgcaggcgagygtaaacagtgcacgggcgcgtgtgtgctcactgtgtgcgcaggcgagtgtaaactgcacgggcacgtgtgcttactgtgcacaggcgagtgtaaacagtgcacgggcgcgtgtgctcactgtgtgcrcaggcgagtgtaagtgcacgggcgtgtgtgctcactgcgcaggcgagygtaaactgcacaggcgcgtgtgtgctcactgtgcgcaggcgagtgtaaactgcacgggcgcgtgtgtgctcactgcgcaggcgagtttaaacagtgcacgggcgcgtgtgtgctcacygtgtgcgcaggcgagtgtaagtgcacgagcgcgtgtgtgctcactgcgcaggcgtctgtaaacagtgcatgggcatgtgtgctgtgtgtgtgcaggcgaccgtaaacagtgcacggacgcgtgtgtgctcaccgtgtgcgcaggcgagtgtaaacagtgcacgggtgtgtgtgctcactgtgcaggcgagtgtaaactgcacaggcgcgtgtgctcaccgtgtgcgcaggcgagtgtaaacagtgcacgggcgcgtgtgctcaccgtgtgcgcaggcgtgtaaactgcacgggcgcgtgtgctcactgcgcaggcgagtgtaaacagtgcacgggcgcgtgtgtgctcactgtgcgcaggcgagtttaaacagcgcacgggcgcgtgtgtgctcactgcgcaggcgagtgtaaactgcacgggcgcgtgtgctcactgcgcaggcgagcgtaaacagtgcacgggcgcgcgtgtgctcaccgtgcgcgcaggcgagcgtaaacagtgcacgggcgcgcgtgtgctcaccgtgcgcgcaggcgagcgtaagcagtgcacgggcgcgcgtgctcaccgtgcgcgcaggcgagtgtaaacagtgcacgggcgtgtgtgttcaccgtgtgcacaggcgagtgtaaacacagctggtgccctggtgcgtgtgtgctgtgagcacaggtgtctgtaaatgatgtaaacctcccttgacgtcaggcccaaaagcctgccttgccctaaggtcaagaggtgtatctggctgatgccagcgtctgggtgaggaaagagcaggttccacaagggcgactcctgtgagggtgttggcctgagcgcgcatgcggggaggggtcggggtgggggcggcgcgccgcagtaactcagggccccatcccgctcccgtctgtccagcggtcctagacccccatgtcctgaagcgcacctgtgcccacctggccccggggagcacaggtgtggagatggggtgtcgtgctgggggttcttccccacgcgctgccccaccannnnnnnnnnnnnnnnnnnntgtgctcaccgtgtgcgcaggcgagtgtaaacagtgcacgggtgtgtgtgctcactgtgcaggcgagtgtaaactgcacaggcgcgtgtgctcaccgtgtgcgcaggcgagtgtaaacagtgcacgggcgcgtgtgctcaccgtgtgcgcaggcgtgtaaactgcacgggcgcgtgtgctcactgcgcaggcgagtgtaaacagtgcacgggcgcgtgtgtgctcactgtgcgcaggcgagtttaaacagcgcacgggcgcgtgtgtgctcactgcgcaggcgagtgtaaactgcacgggcgcgtgtgctcactgcgcaggcgagcgtaaacagtgcacgggcgcgcgtgtgctcaccgtgcgcgcaggcgagcgtaaacagtgcacgggcgcgcgtgtgctcaccgtgcgcgcaggcgagcgtaaacagtgcacgggcgcgcgtgtgctcaccgtgcgcgcaggcgagcgtaaacagtgcacgggcgcgcgtgtgctcaccgtgcgcgcaggcgagcgtaaacagtgcacgggcgcgcgtgtgctcaccgtgcgcgcaggcgagcgtaagcagtgcacgggcgcgcgtgctcaccgtgtgcgcaggcgagtgtaaacagtgcacgggcgtgtgtgttcaccgtgtgcgcaggcgagtgtaaacacagctggtgccctggtgcgtgtgtgctgtgagcacaggtgtctgtaaatgatgtaaacctcccttgacgtcaggcccaaaagcctgccttgccctaaggtcaagaggtgtatctggctgatgccagcgtctgggtgaggaaagagcaggttccacaagggcgactcctgtgagggtgttggcctgagcgcgcatgcggggaggggtcggggtgggggcggcgcgccgcagtaactcagggccccatcccgctcccgtctgtccagcggtcctagacccccatgtcctgaagcgcacctgtgcccacctggccccggggagcgcaggtgtggagatggggtgtcgtgcctgggggttccttccccacgcgctgccccaccaggatttccctggggtggggagggctgctgagacagggcgctgccctcctccagggtgactgagatgcagtttacaaccatgatctcctggccgggcgtggtggctcacggctgtaatcccagctctttgggaggccgaagtgggcggatcacgaggtcaggagatcaagaccatcctggctagcacggtgaaaccccgtctctactaaaaatacaaaaaaaaaatactagccgggcgtggtggcgggcgcctgtagtcccagctactcgggaggctgaggcaggagaatggcgtgaacccaggaggcggagcttgcagtgagcccagttcacgccactgcattccagcctgggcgacagagcgagactccatctcaaaaaaataaaataaataaacaaccatgatctcccgtttcaagttgccaccactaactgtagccccgctgacgggggcactggccttgcagactgtccaggacggccggcagtttctaaagtatgttgaccccaagctgggagtcccactgccagagagagactacgggggaaactgcctcatctacgacccagacaatgagactgacccctttcacaacatctgggtaagacgccgggggccctgaggcgagyccctccccaggtgtggccccgtgccggaccaggcrccatccacgctcctgcctcgcacccctcagcccacacttggggtctcctggtgcagagatgtgctgaggccctgtccgtctggatggtgctcatggtgggcagggggcccctgctctctargctgtcgtggacgtggtctccacaggccacggcagcacctgtgagtccctggccttcttcccggggtctggcaggtgctgctcaggtgtgggctgatctgccggtgtggggagtgggggtggctgtgccccagggtcaagggtcataccctgtcgcccacaggacaagttggatggctttgttcccgcgcactttcttggctggtacctgaaggtacggcacctcctcttcccggcctccccgccccggttctgaggcctgccgtgggctctggaccgtttctgtccatggagttgagctcagggtgctctgagtgtggtgggagggtgtcgcactgcagccacccagaggttcgagaagccgtggggctcccggacctcccagaagccctgatcctggtcgggtccccgctcygtcmtcagggtcggggcggtggaaagaggcggcagggcaggaagtcccgcccctgcctgggcttgggcactgccccatcccacttctgagggaccctgtgctacctatggggctaagagcagtgcctgcttgaccctgcagcccaccctggcagagtttggtgtcaggccccgggcacggggatgctgccttgtttgctgacagtcgtacatcgaggctgctggaggggcagccacccaccccacgctcaccctgagacctcactgggggccctgccagtgctgtcgactccaagaatgctgccagccggggtgggggctgcacgcacccgtgggcagggccgggcgtggcctgcgtcccatactctggctgccagccgggtgggggctgcacgcacccgtgggcagggccgggcgtggccggcgtcccatactctggctgccagccggggtgggggctgcacgcacccgtgggcagggccgggtgtggccggcgtcccatactctggctgaccctggcgcccacagaccctgatgatccgagactggtggatgtgcatgatcatcagcgtgatgttcgagttcctggagtacagcctggagcaccagctgcccaacttcagcgagtgctggtgggatcacgtaggtgccagcacagccccyggggcagtcggtgcaggctgaggggcattctcggaacccctgtgcccagcgcggcmcctggaccccctcattctccccggggggcagtgggtgcaggctgaggggcattctcggttcccctgwgctcttccggggtcctcctcggggggctcgttacccctcacccctgcaacgagtgctggcccctccctgcagtggatcatggacrtgctcgtctgcaacgggctgggcatctactgcggcatgaagacccttgagtggctgtccctgaagacgtacaagtggcagggcctctggaacattccgacctacaagtacgtcgtgggggctgcgagggcagggccgggtgggggttacctggaggcagcctcagcgtccgtgctccagcagaccccgagcaccaggcccgtccagtgtgcggctcaggaggggtgaccgtggggctttgcctcctggaacctccctctgacctggtgtcactcaagcccggccgcccctcacagtggccatggcgtctgacccacgtacctccctcctcaatccctggccggcctggcgcaggggctgtgggatcattccgtgcttctccctcccttggttgctttggttatgaaatagttgcaggtactttgtcattatgactttggaatttaaaaaagaaacagaagtctaaggaaaggcctgggggacgggggtctcccctcctgcctgtgggtgccccggctctgcctggctctgcagacatggctagctcacggcaccgtggagcgccctctgaggcgctgcagccactgctcaagctggaagagactgaacagcagagggccgtggagaagcagggcttgtagctgggtggccagacctcggagaacagccgggcagcagctgggtaaccaggaacagagtctgtggcccgatggcacagggcggggcggggtgaccaagagcagagctcgtccgatggcacagggcggggccgggtgaccaggaacagtctgttgcccgatggcacagggcagggttcggtgggctgccttcctcaggctgccggctctgtggttcccaggggcaagatgaagaggatcgccttccagttcacgccgtacagctgggttcgcttcgagtggaagccggcctccagcctgcgtcgctggctggccgtgtgcggcatcatcctggtggtaaggccgggctgcctcgcgacggcgcggcgggcggggggccagagctggtgctcaccctctcctcccctagttcctgttggcagaactgaacacgttctacctgaagtttgtgctgtggatgcccccggagcactacctggtcctcctgcggctcgtcttcttcgtgaacgtgggtggcgtggccatgcgtgagatctacgacttcatggatgacccgtgagggctgcggcagtccgggtggagacacccccggggggcaggggccggagggctggggagcagagcctgggaggccggagcctgggcaagtcmgcctggaggaccctgcggggcccgggacgctgaaccccctgctgcccctgcaggaagccccacaagaagctgggcccgcaggcctggctggtggcggccatcacggccacggagctgctcatcgtggtgaagtacgacccccacacgctcaccctgtccctgcccttctacatctcccagtgctggaccctcggctccgtcctggygctcacctggaccgtctggcgcttcttcctgcggtgagtcagggcagggcgcgtatgttctgaaggagggccgctgtccgggtcccttggcacaggcactgtgggagtttggtgtcgttggtgtctcactgtccctgcttcaaccctctggccgcctctgcgggaggcgcctttcctgacccagccctcggggccttcgctctgcactgacagatccaggctcctcagggctccagtctgccacggctgccgtcccagggccagggtacccggcacccacccagtccattccggacctccacagggactaggtgccagctgtccatggggcctgcagtggggctggtgtgggggcaggtggtgacsctgcatcccgctccccagggayatcacattgaggtacaaggagacccggtggcagaagtggcagaacaaggatgaccagggcagcaccgtcggcaacggggaccagcacccactggggctggacgaagacctgctggggcctggggtggccgagggcgagggagcaccaactccaaactgacctgggccgtggctgcctcgtgagcctcccagagcccaggcctccgtggcctcctcctgtgtgagtcccaccaggagccacgtgcccggccttgccctcaaggttttttgcttttctcctgtgcacctggcgaggctgaaggcgaggggtggaggaggccccagcacagcctcatctccatgtgtacacgtgtgtacgtgtgtatgcgtgtgtgtacgcgtgtgtacgcgcgtgtgtacacatgcgtggccgcctgtggtgtgcacgtgtgctctgggctccgaggcttctccagagctgggagctggctggcgtggcaagggcatgctctggggcagtgtgtccctcaggaaccagggtcctccctcccctttctgcctggtcagccccgtggcctctggcccaccaagctccctgtcacccagccatggtgtggtccaggcagggacatctcggtaccctttctgcactccgtgggccctgggtgcgctgaggcctggaggcgtctacactggctccacatccacttcccccgcagctcgtgtgggcgctcgtccacaaacactccgtggctgagaggcagcggatccaggcagcgatgctgagccacctcctccgagccttcctttcacacagaccaccccggaggacacgtggatgatggggtcagagatcactgagctgcccctcaagggggcctggaacccgggtgctggggtcatgctgcctccgtggctccaaggtgagggtcmtcttcacgagcaaagagaaccaataaagtgacaacgaacgtctgaggcttccagccctccccccagctccccgtgtcctgctttggggtccagtgcagccctccagcctgccctcatgcccagtgcccacttggggaaaaccacacagaggacaggaggcactcagcctctgcacctgagcaaagacttggcgcctgccccgccccaccccccagagagagcaggtgccagatgcagcccctctcccattctccaggagggtccaggtggcacccaccctctgctgcgcttgtccaagggctggcggccactgggcagtggacacaggattcctggggtactgtgtttgtcccaggctggcagacactgggcagtggacacaggattcctggggtgctgtgtttgtcccaggctggcagacactgggcagtggacacaggattcctggggtgctgtgtttgtcccaggctggcagacactgggcagtggacacaggattcctggggaggggcagccgccttctcgggccactatttttatgtttttttttctttttctttccttcctttttgtggagaacggggtctcgctatattgcccaggcagatctcgaactcctgggttcaagtgatcctcctgcctctgcctccctgagagctgggattacaggcgtgagccaccatgcccagcttgagccactatttttttgagatggagtctcactctgtcagccaggctggagtgcagtggcgtgatcttggctcactgcaacctctgcctcctaggttcaagtaattctgcctcagcctcccaagtagctgggattacaggcgcatgccaccatgcccggctaattttagtacttttagtacagatggggtttcaccatgttggccaggctggtcttgaactcccaacctcaggtgatccacccgccttggcctcccgaagtgctgggattacaggcgtgagccaccgcgcccagccaggccactatttctaaaactttaccatgaaaattttcaaacacaaatggagagaaaaggggttccctgagccctgttcctagctggagggggtagtaaggggtgttgatggctgattggacacagcctggggggactccgggagccatttgcacccacacccccgggtctgcctcggggccccgggcgtcaaaaagctttacttttagtatttttccttgactacttttggggaaaatttcaagccctctaagtcaagggctgtaatgtggagcacacacaagagcagcctctggggctcagcaggaagacgtccggtgtggccaccgcgcctagcagtcctctttccagtcacggccactcacagctttggcctccgtggccctgcacggatgagttcttccagctgccctgccctgcgtgctgcaggacacatggggccttagcattctgctctttgcaggtggcagctttgatcgctcaggaggaactgccacctgatctccccactgcaggggcccccactccccccctcacgcgctgcgggtcctgtcactccacccacgctgtccatccccgctgatgctctgagccaggtggtagcaggtgggggtggcgccccgctcacggtcwccrtctgctcttcccgaggggggcgaggcagggcttgtgattaaagtcctgtgttccggcgcccgtgtcccaaaggcagcccctgggagcccttccggcagcaactcaaccccagacagcgcccaggggctctggttcctcacgcgctgagatgctccggactcaccttgggcatctctcgccccaggcctggcgtcacccatttccccaaggagctctgttccccactggaggtcatagttaagaaactaagatcctgggtcactttattttacttatttatttttgagacggagtctcactctgtcgccctggttggagtacactggcgtgagctcagctcactgcaacctccacctcccaggttcaagcgattctcatgcctcagcctcccgagtacctgggattacaggcatgcgccaccatacccagctaatttttgtatttttagtatagatgggttttcaccgtgttggccaggctggtctccaactcctgacctcaagtgatccgcccacctcagcttcccaaagtgctgggattacaggcatgagccaccgcgcccagcccctgggtcactttaaagggctttatagccaggtgcaatggctcacacctgtaatacccgcactttgggaggccaagaccaaacaccagcctcggcaacatggcaagaccctgtccctacaaaaagtacaaaaattagccaggtgtggtggtgcatgcctgtagtcctagctacctgggaggctgaggtgggaggacggtttgagtcccagaggtccaggctgtagtgagccaagattgcgccactgcactccagcctgggcaagagagagaccctgtccaaaagagggggattgccaggcagcttctttgcaatgaacttgtagttgctgactcagcatcggacctttgaaagctggtgagcgtccccctcttggcttggcagggcagggcaccccgggctggcccaccttggtcagctgtccacccgtgggcaagatgggctgccccatcatcccacacagagctggggcgagcactgggctccgggcaggaacccgggccgcgctgggccgcgctgggctgggctgggctgggctgggctgggctgggctgggctggggggcagtcagggcagtgctgggggctcctgaggctccggggtggaagctgcgggagcagctgggcctgcaggcagctcccagcaggcgtcaccctgcacgggcaacagagccaaggggcatccctccaccctgggcagggcctgccctgtgctccccagtgtgggtgggtgcagctcaggggacccagctgagcacagccagggccttgggctgcttccctggtgcggggtcccttaggcagggagagaagccaagtggggtggtgtcgtctccaatgccagcgcctcgcaaggaccccaggaaggacaagagccyctcctgccaagaaagkgctttaatgattataaagkgtccaaaatatactggcagaaataagcggatctgagcgtttctcttcaaacctaggatatgcagggtgagagcatggcaggggctggtgggccccagggttgcctcgaggccggtcgtccagggagagcagcagcaggaagagcctcaggagatgaccctcagggatggcttgtccttctccagggcctgcagccggtcctccatctcctcagaccagtaaatgtcgtacaggctgcacacaggccagaagggaggcatgggcccgtgtcctcccccacccccgccttcctccctgggcagccctggccgcaccacccgcccagcgcgtgcacatacaccagctgctccaggaggcagcccggctgccggacgctctccaccagctgcaggatgccsgcgtcccccaggcagttgttgctgaggtccagctcacgcaggctgtggttggccaacagggttgcggcgaggctgctgcagctgctgtcactcacatcgcagtcggccaacctgkgtgaagcagggcgggggtcagggtgccgggcgtgcctggcaccgcactgaccggcagagcaggcctgggcctggggggcgcgacggacacctgtgctcggcaactcaggaccctcaggtggggccgtccccaaggctcaccgtccctgtggccctgggcaggttccccaccacggacaaggaaggcacagacaagcgaggcacaagcagcctcactcgcctgagatcttctgcagggaggagaaaggacaggagagagatgtcgtccacccagagagccacacccacccccttgtcacctcgacaccgtctggctgcgtgggcttcaaaggagaagccagccagagactgaggagcagctgtggggaaacgagggtatggagggtaccaagacaagaacagagtggacaacagactttaggctccagagagagacaagagaacgggtcagacaaaagaggatgggatagagaagacccaacacccacttcccggggtggagccgccacaggccggacagcagggccaaggagttgcactggacctctccaaggtgggggccagggaagctgcaggacccccaccctgtgagtggctcagggggaacaagtctgcagtgaccaggacccaaggttcctctccacatctggaacacccacaaggtcctggcagccaggatggtgtcccctggcagggaactgaaaatcccccatcaggaggaagccctcgagaaacgcagccatgactcggcctgcagggctcactgtccagggctcccgggcctcactctgcacctggtgcccagcccaggatgaccagccacccacggaaagccsctggcgagaggcacacgggaaacagcaaacaaaagacaaaacactgagggtggaaattcagtagactggctggtaaatgagaacatctcccaaaaataaaacaaaacatcgaaaagaaaatttggagaacataattagagggtcactccacaagacatcaggacaggctcatgggcacaccaaaaaagaaacataagaaaggagagagaaaaaaatcaccaaaggtatattttcttagtagaaccaagtatccagcacaaagaaccaagacccccatcaaggccaagcacatggaacccctaacacagtgaacaaagagagcttgaaaagctgccaacgagaaaaagcagatcgtgcacacaaggtcacagtggctcacgcctgtaatcgcagcactttgggaggctgaggcaggctcatcacttgaggtcaatagttcaagaccagcctgcccaacatggtgaaaccccatctctactaaaaatacaaaaattaggccaggcgtggtggctcacgcctgtaatcccagcaatttaggaggccgaggcaggcggatcacgaggtcaggatatcaagaccatactggctaacacggtgaaaccccatctctactaaaagtacaaaaaattagcctggtgtggtgacgggygcctgtggtcccagctactcgggaggttgagacaggagaatggcatgaacttgggaggcggagcttgcagtgagccaagatcgcaccactgcactccagcctgggcgacagagcaagactctctcaaaaaaacaaacaaaataaaattagccgggcataatggtgcatgctatacccggctaaatgatccaaggacagaacaggggcacaagaccccaaaaattacctcctgcaaaaccttttcttagaaagctgcaaaagaacgtgctttaacaaagaaaacaaatctggaaaaacatcctgacacaggcggggttcccgcaagggagaaaggtgggcggggcttccaggaagatggaccacagggtggccaggtaggctgcagctccgtgaagctctcaggcttcatgaaacatgacctctgactttcagagttaaaatgagaactaagccagagtggtgccgccagcccgcctttcccagtacatgaacatgcaccctcactctcgcccatgtgctcacactcacatggacactcgtgctcactctcgcccatgtgccacactcacgtgctcactcgcccatgtgctcacactcacatggacactcatgctcactctcacccatgtgctcacacacggacactcgtgctcactctcacccatgtgctcacgtactctcgcccatgtgctcacacacggacactcatgctcactctcgcccatgtgctcacacacggacactcgtgctcattcttgcccatgtgctcacacacggaccctcgtgctcactctcacgtgctcacacacggacactcgtgctcactcacccatgtgctcacactcggacactcgtgctctcacccatgtgctcacacacggacactcatgctctctcgcccatgtgctcacacacactcgtgctccctctcgcccatgtgctcacactcacacggacactcgtgctcattc

SEQ ID NO: 94228 - DNA, 42985 bp, Homo sapiens
ggagcctactattccaatgtcctacaatagatctgacagctataattttgtagccctttagaaaaaaaatatcttggtaggactcttaaaagtatggcctggaagactgcaggtttgccatcttatccatggttgtctagtgggatagatgacttgggtctttacttaatgcaattcttgtaattaggttaaggtcaagaattggttattgtcctgaatttgatgtcttgctagaatatatgactgctcaggaaataatgatcatgtatgccagattatggggagtccctaagccccagattcaactgtatgtgaagaaatggttgaattcacttgaactggagcctcatgctgatgagcttatcaacacctacaggtgagtcattatgctgctgcactttttgttgatgctgctaatgttgaggtgctttcttttgtccctgctgtttgaaatgaagcccatagctccacctatgctccttttcccacaattacctaattacgaaactgtctaatgttctactaggtttcagatacgagtagtaaggcagatcaatgtagcttcacgtcgtccttttgcagaaatggaacaataaatcttaggtttttttgaactgtagcttctgaacctcaaaagggatcaattaagagggagtttaggattgctaaagcagctagaatttgaagagcagggtgatgataaagacgaagcgggggcccagaaatttgaatggggtttgctgtgagtcatgagctggcctgtgccatgtgcaaagggagagatgctgtgaggcctatcagagaatggcacctgctagactgagaactgaatgtgttaccggtggacgatatctgagttactggcggtgaatctgtgtacatctgcagctacctcaattcttgcctcctcagaagaaagaaatcaacagaggggcataaggcagaaaaagagaccaaggcaagtttcagagcaggagtggaagtttatttaaaaggctttagaacaggataaaaaaggaaaggaaagtatgcttggaagagacccaaccaggcactgaggtcaagcgctctgtttaacagtaatctttataggctggcccctttctcatgattcttcccttagggtgggctgcccgcatgcctggtacccccctcacccgttggaggtgagcatgcgcagcgtgtttaagaagttgtacccatgcccatctgagactttcttccctattctggtggagtaaccctggaaagtcatactccgccattttgtctcttaatgcacatgcccaggaagttgcttctccctggtgtctgcattcaattaacactgttaatttagtgcaacgggtgtggactatcaggaaatggcctctccaatttatctttttttttttttttttgaggcagaatttcgctcttgttgcccaggctggagtgcagtggcgcgatctcggctcacccaaacctccgcctcctgggttcaagtgattctcctgccttagcctcccgagtagctgggattacaggcacccgccaccatccctggctaattttgtatctttagtagagatggggtttctccatgttgttcaggctggtctcaaactcccgacctcaggtgatccgcccgccttggcctcccaaagtgttgggattacaggtctgagccaccgcgcctggcccaatttatcacttagagaggcaatgtgataactgccaaatcatcacccgacattcctggtggatggggggagagccctctcctgtcccgctcatacctgtctaactacctgtaacaaaggtagacccagagtttacatagtgcagaaaatgtcggaattcttactgagagccacagtagagataccttactgagcaccccttacagttataactccagaaaagccatgccttagaagtaaagatcatgtcctagaataagatcaaaaacctaaatagacccaccctaataaagaataaaataaaagcctgacagaatcaaagggagcacgcaaaatatacgaaagctgggaaaagacgtttacttctgtgaaccaaaagtatctgagacaggtctcaatcaatgtggaaagtttccattgccaaggttaaggataagcgcctgagaggtatgtctatgcctttctccaaagatgatttcaagggcttcaatatttaaggagaaaggattgatatgggtgaaaaggaagaaaatttgaaatcttaattccagctctttgggaggccagtccagtggactgcctgaggtcaggagtttgagaccagcctgagcaacatggcaaaaccccatctctatcaaaaatacaaaaattagccagatgtggtggcatatgcctgtggtcccagctactcaggagactgaagtgggaggactacttgagcccaggaagtactggaagcactcaagcgtgagtgacagatcaagaccgtctcaaaaaaaaaaaaaaaaaaagaaaaaatttaaaaatgtgtgggtatacaagagacaaagggttgcatccccttgagtctttgatcagcctttcactgaatatacaatttacatgtgagaggatgggcagaggaatactcacttatgtcattgtctggctcagagaatcttcattttttttacataatacaatgtaaacaatagggcagaggaagccatcagatacacatttgtttaagatggactttgagttctgtcctttgtcctgcacctgtgaaaataagctatcaggcctggtgcggtggctcacacctgtaatcccagcactttgggaggccgaggtgggtgcatcacctgaggtcaggagttcgagaccagcctggccaacatagtgaaaccctgtctctactaaaaatgcaaaattagccaggcatcatggcacatgcctgtaatctcagctactcaggaggctgaggtgggagaatctgcttgaaaccaggaggtggaggttgtagtgagctcagatcatgccattccactccagcctgggcaacaagagtgaaactctccaaaaaaaaaaaaaaaaaaaaaaaaaaagagggaggagggagggaggaagggagggagagagagaaacagagaaagagagacagagagagagagagaaaggaaaggaagaaaaggaaaggaaggaaggaagacagctatcaatttacattgccagggtgaaattcaacaaaactgttttagggtaaagatcctcagatccacatggaattgccctgtgggcaaattgtaaggtaagttatgtagctttttatccttatagctatcttatttaggaataaaacgggaggcaggtttgtctgacatcattcccagcttgaattttccctttggcttagtgatttggaggccctgagattttttttcctttcacacttcctaactcattttatctatgacagaaaaatgcatgaatggggggaatgaaagtgaaagttaaagccagtatcactctggaacataaatgcacaaatcctaaacaaataagtagcaaattaggtctagcaatatattaaaagaataaaacatccagaccaagttgggtttataacaggaatgaaaggtttatttataatttgaatcaatcaatataacttaacacagaataagaccaatctgttcacctcaatacatggaaaaagtatatgtgaccaaaaacaataattatagaatattagaaattgatatgaacttttttttcccccccgagacagagtctcgctgtgtcgcctaggctggagtacaatggcagtgatctcggctcactgcaacttccgcctcccaggttcaagcaattctccctgcctcagcctcccgagtatctaagatttcagtcaactgccaccatgcccggctaatttttgtatttttttttcagtagagacagggttttgccacgttggccaggctggtcttgaactcctgacctcaggtgatgcacccaccttggcctcccatagtgctgggattacaggcatgagccactgtgcctggcccagggaatatttcatcagagataatacctgacagggtaggattctgaaaggaatggggaaggaaatgccaacatcgaaattatgcattggggaagccatgattaatgcctctggccctaagatggcaaggtaatgttgttcccaagtataaacccacatcaccttcctctggtgtgttttactcctactgttgcctgctttctctttacattctcccaccccatactcaccgcgagcgctcaggctaggtagttaggctccatagagtcaaattggaccccacattaacgaaactaacaattcgagctttccagcaatgaactcatctgctcttccatgtctactcttttcctgtctgctggtttcctctcccagggctttcagtgtgttctacgcagaaaccagttcaaggactgggttttcttctgcaataaaatgctggagttgtggcagagacctccacagtgagaacagccacggagttggctaggaggtgacatgatgtggaagtggtggatgtgtccacaagatggcactcctaatttgtagcttaatgcttaataggacattttgcaattgacaaacttgggattttatgatttatgtagctgatatcatgaattatgtttcaaatcctgccacattttgaacagaatttatttttgcccctttctgatattgggtcataacctaagaatgagaggacattataagcaggtgtgggtgtgtgtgtgtgtgtgtgtgtgtgtgcacttgagtgtggagacttttgtgttcctcctacctgacctgaactgttgaatgatgaagttacaatgattggactcaggggtgcagctagctaacttgggaattggggttttgaagtactggagacagctttgtatgccatgttaatgaatttgaattttatcctgaaaaacgtggctgtcgttgaagaattttaagcaggcaggtggcttgatcagagcactgcttcccagatttcactcaatggtacctgtataacacattcatgatttttgctgtatctccgtatcatcaagttacttaacgtttttacaccaacttttattattttataaatgtacttaaagaggaaattcactactagcattgcttgccataatcaaaataaatatattattaaaatggaacagtgctaaataaggtgtacacatggacatagagtgtggaatgacagacactggagactccgaaaggtggaggggtgggagagaggtgaacgatgagaaagtacttaatgggtaccatgtacattattcgggtgatgggtacactaaaagcccagacttcaccattactgcaatatatccatataacataactgtacttgcgccccttaaatttatacaaatttttaaaaggaaaaaatggaagtgttcatctatgtaccaacttaaaatcatctcacgcaccactagtgttaaatctaccacatgtggggaaactgtgtggtatgaattgggttgagggcgtccccagcaggcacagaaattgggttggtgccaggttcttaatgcccagatcttaattagagagcccaagtccgttgtaggcctggagcaattcagacacaaggcaaaaagaaagtacatttgcctatgccttgtaacgtctacaccaccagcctttctgaaactattgtgcatacgaagtcatcccaggatcttgtaaaaacaccgattcggatccaatatgggacctggagttcatacatttctaatcaactcctaaatgatattgatgctgatactgtcggtttcccaaccaagcaacgtagcaaggtacgaaactctaaagtccctaaagggcagggaccacgcctctcgcgttggcatagtgcctagctcaaggcactttctgggttaacactcgctgaggaccggagtgaacgcccccgccccaagtcgtcacgtgactgactttctccaactgccggtttcggctcacataacacacctactatccaaaacatttctattttcctaacacaaaaactatagctaagtttttatattctatgtagccccagcctaggacgtaaattccacgagaccaaaagccttgtgatgattccccgaggttgctgaccctcccggtgtgtcccgggcctgctctgggggacacagcggcgaatacgttgaacgaggcccctgtttcacggagctaaagatccagtaaggacttcacccagcgagaggcaactacgccgggcttcgatacccaatacctctgcagaaaggtggagtggcaggaatctcctgaagcctccaacgtccaggaacgcggaaacccagggcctccagtgcaggtgtcatcccggagggcgcatgcggagtcccaagagaggmgcgtcccattggacaatgctgagcggaagagcccaagatagcggggggagttgtgacaggctgctgcagacgtacttagaaaaggggtgcatactggatattcaggctaggagaagaacgcaaaaagcagtgacgtacattattctctgcatatatttacttgggaaattgtgcgtctccctattctgagtcttggaggaattggactggtccaaccttataaagagagcagtagagcgcggcagtatagagagtacctcacgaaggggacgtgggaaagtgttagcggggaacgctgggaaactcccggcctccgccaccatcttgctttcctttaatccggcagtgaccgtgtgtcagaacaatcttgaatcatgaagctactaaccagagccggctctttctcggtgagctcaggtggcgggtttgggaaagggctggggagcagtgtgtcgacaaggtgatacgaggcggaggtgtctggtctggggtctgggccttgggattcggtctgcccttcagctgaaccctgcgggccaagtgggctgcagactgggtcaggctttggaggcccagctcatgctgtgagcacaagagacctaacaccgggaaacctgaagagaggggcaggacgtgagagcggagttgaagcgagtccttggagagacttctgaaggtcactccggtactcaagtgctggagaaagagaccgtgaaacccagggggagcgggaggacggcgcacttagccccccaccttcactttatccgctgcagcctctgctccttggtttatcacggagcgtcagtttccccagcgaataaaagtataagaaaggagctaatgcagatagaacacttattacagtacctggaacttcattgttaaatactatggtgtcttagtagtctaacgttgcttttcttgatcgtatgttagacggttcctccaagacgtctctgtttgtcctcaaaagctccttaattaagtttccccttcaagcctaaattaaacatagctgtcacttggggaaaactcacacatcagggttatatcactgtgggacagtggttattaagaggggtaagggggaacacttaaaaaatcatagcgagggacagaatgcccccagggaaccggtggcgatgtttggagacatatttagttgcaacaacttgtaaggagggtgctattggcatggagaggccagggatgctgctaaacttcgccttacagcaaagaattatctagccccaagtgccagtagtagtacctgtgttgagaaacccccctagatggagatgcagaagaccagacctgggcatggaatgttcttatgctttatgtttacataaatgtgctgtgggctatatcgatttaggctgtaattgcattaaccttccaggtatacctagacacaccagtgattacccttggagggaagcacggttagattggcaaaagaccccaacatttccttctccattctattttgcaacagaaaaagctcagagaaaacagttggagaggcccaaagtaaacaaattgcagtaaacttgaaagcaattatttatgtgtctaattttagcactttatataggagaataaacttagatatatcttgttattagaacaaaataatttagaagattgcatgacagttactaggataatttgctgatttgaatgggacgattaagaagcacattaccggcggagcgcgatggctcacacctgtaatcctagcactttgggagtcagaggcaggcggatcacttgagatgaggagttcgaaaccagtctggccatcatggtgaaaccccgtctctactaaaaatacaaaaaaaaaaaaaatagccgggcgtggtggtggtgggcgcctctaatcccagctactcaggaggctgaggcaggagaatctcttgaacccaggaggcggaggttgcagtgagccgagatcgcaccgctgcactccagcctagacgacagagcgrgactccgtctcaaaaaaaaaaaaaaaaaaaaattaccaacaaagagttactatttgggcacatttggttggaaaacacctaaaatctcacttggtaacggaattatagattattcatatttgaattgctatgcccatatatcttaaaagtttactttttggaaaattataggccaaaattacaaagaaggttaactataccatacccagsaaactaaattgatgacgataaagtaaagctaattgtaattcataactgaaaagcagtactaaaagcaagtgataaccagcagccaacytagtacagcactaatgatgtacaacaaacagccttctggacagcacagagtggaggcattgcagactgtgcagggatgtccgggaaactccagtgaggaggtgttcattgggtcttgggagcaccaaattttattcactcatcatctcctctaataacctcatgaactttagtcataatcagaatgatttgtatggcattgtataayatttgccaaaacaaactgaataaaatgaatgcattttgggtccattatctaatatttaatgggaccctttcaccctaccagtaactgcattttatatattgagaatctgatgtggatgaagccattattaatctcaggatgacatacatgtcataaatgttttatttagtcaaaaaaactaagacctttggttgtgtggtcttaatacagcacacaagagtgaagatacaatggaaaatattgagggcttggaggaagttggtatatactttgtctttttcttttttttttcttgagacggagttttgctcttgttgcccaggctagactgcaatggcacaatctcggctcactgcaacctccgcctcccggattcaagtgattctcctgcctcagcctccccagtagctgggattacaggcatgcatcaccacgccccgcttattttgtgtttttattagagatggggtttctccatgtttgtcaggctagtctcgagctcctgacctcaggtgatccgcccaccttggcctcccaaagtgctgggattacaggcgtgagccaccgcacccggctagtttgtcttttttaaaggttactaagatgattaaggagatgaaaccatttcaattggaaattagactgaacggatgacattcattgggcagataaaagaagcaagaagctgaaacctataaaaggttgtggacacaggccaggtgtggtggctcccacctgtaattctagcactttgtgaggccgaggcgggtggattgcctgagctcaggagtttgagaccagcctgagctatggggtgaaacgccatctctactaaaatacaaaaaattagccaggcgtggcagcatgtacctgtaatcccagctacttgggaggctgagacaggagaatcgcttgaatccaggaggcagacattgcaatgacccgagatcgcactgttgcactccagcgtgggacacagagcacgactccaactcaacaaaaaaggttgtggatggggtgatctgacactttttcaaaaaatgccaaagctttagaactacacagaaccatgaaacttttataaggtaactgaaagataagaaaatacagtgattctttacatcatttaaaaaataagcatcaagaactctataaatcactaataaatagaggtttaagaatggcttgggtaaactggtgggttagtaagtccataataagttatgcagctaggcggggtgcagtggctcacgcctgtaattccaacactttgggagaccaaggtgggcagatcacttaagatcaggagttcaagaccagcttggccaacacagtgaaaccccatctctactaaaaaatacaaaacaaaaactagctggacatggtggcacgcacctgtaattccagctatttgggaggctaaggcaggagaatggcttgaacccaggaggtagaggttgcagtgagctgagattgcgccactgcactccagcctgagcgacagagagacactctgtctcaaaaaaaaaaaaaaaatgttatgcaggtaaatcctcccatggaggtggttattgctccttccacccccgaacaccctctgtcgcttgggtaccctaagataccatgcttttatataaagcactgttcttgtgagaaatacgtgtaacctgtgttttttatgtttagagattttattccctcaaagttgcccccaaagttaaagccacagctgcgcctgcaggagcaccgccacaacctcaggaccttgaggttagtcccactaacttgctcgctggaagctatacatgccttactctccttggtaatacgaagacattcattatatctctactttattttaaatacagtttaccaagttaccaaatggcttggtkattgcttctttgkaaaactattctcctgtatcaagaattggtttgttcattaaagcaggcagtagatatgaggacttcagcaatttaggaaccacccatttgctgcgtcttacatccagtctggtgagtatcttcacttcctcaagtgtttggaaatgctgtggtatcttggtcctgtgaaaaagaaaaactaagatcaatgtctttatattttgattccttgacctgccataacaaattaccacggactgggtagcttaaaccaaataagtttatcctgttacagttctagaggctagaagtccaagtcaaggtgtctaagccaagccaagatatcagcagggctgtgatccctctaaaggttctaggaaggcacaaatcctcccctgcctgttcctagcttccagcagttgcccacaacccttcatgttccttgacctgcaactgcatcactgcagtctctgcctttgttgtcacatggccttccttctgtctgtgtccacatttcctcctgataaggataccagttacattagatttagtgcccactataattcaatatgatgtcatcttaagtacttaaatctgcagagaccttattaccaaataaagtaacatgcaaatattctggctggacataaatttgggggggaacactgttaaacccagtactgtcccctaatgtaaaatgagaaaccacaagatatttgccacagagaagcactaaattagtatccatatgaatgttgatgttagagcataagaaatcagtaaacaaatttttaacaggaagtgccgcaaattgaaagaaaattaactctttttttcccatatacaagtctctttcagaatagactaatgaatccagtaagcttgtatttgacagtggaaattttacatgaatgtacttaatgtaaaaatgtatacttaagctttttgttgagccttgttttataattcttaactaaaaaggatgcaggaatttagtaaaattctttttaaatctgctcacaacagattttgatatagtgtgatgtttggcaaacttggcattgaaaagctacaaagataatcattctttctttttcaagacgacaaaaggagcttcatctttcaagataacccgtggaattgaagcagttggtggcaaattaaggtttgttaaataagtaatagaaaatagtgaaaatgccagaaaatattcaattttaagggaacttttctctgttatcaaggaggttgaggatttcttaagcaacataagaaggaaaagactgatgaatttgagtatatcaaactgtaaaacatctttatgtcttaaagtaaaaatttaagtaactgtctgggagtagatatctgcaatatataggcatacctcagagatgttgcaggttctgttccagaccaccacaatgaagggaatattgcagcaaagcaagtcataggaattttgtggtttcccagtgcatataaaagttatgtttacactatactgtggtctactaagtgtacaatgacattttgtcttggaaaaaaagtacataaccttaattttaaaatattttattgctttaaaaatgttaacagttatctgaatcttcagcaagtcataatctttgctggtggagggtcttgcctccacgttaatggctgatgactgatcaaggtggtggttgctgaaggtggtggtgactgataatttcttaaaatcagacaacagtgaagtttgctgcattgattgactcttccttttgtgaaagacttctctgtagcatgagatgytgtttttagccgtttacccacagaacttctttcaaaattagtcagtcatctcaaaccttaccacttttttatcaaccaagattatgtaatattcttttttatcatttcgacagtgttcacagcatcttcaaccaggagcagattctatctcaagaaaccactttgtttgctcatccataagaagcatctcctcatctgttcaagctttatcataagattgcagccattcagtcacatcttcaggccccacttctagttctcttgctactcccaccatagttgcagtttcttccccctctgaagtcttgcctctcagagtcatccataagggttggaattggcttcttccaaactcacgttaatgttgatactttgacatcctcccatgagtcacaaatgttcttaatggtgtctagaatggtgaattctttccagaaagttttttaatttactttgcccagatccatcagcgtcttcactatctgtggtagctgtagccttacaaaatgtatttcttaaataataagacttgaaaataaaaattactccttgatccatggggtgcagaagggatgttctattagcaggcatgaaaacagtgtcaatctccttgtacatctgcatcagagctcttggcattgttgcagtaataatttgaaaggaatcttttttctgagcaatgggcttaaaatattcagtcaaccatgctataaacagatgtactatcatccaggcttttttgttcatttacagagcataggcagagtagatttagcataattcctaagggctctaggattttgagaatggtaaatgacctcatcctaaagtcaccagctgcattagtccccaacaagagtcagcttgtcgtttgaagctttgacgccaggcattgacttctctagctacgaatgtcctggacggcatcttccaatgtaaggctgttttgtcagcattgaaaatctgtggtttagtgtagccaccttcatcgatgatcttatgtagatcttctggataacgtgctgcagcttctatattagcatttgctgcttcactgtgtactattatattaagaagatggcttctttccttaaagctcatgaactaaccacggctagcttcagacttttcttctgcatctcacctctctcagccttcatataattgaagagagttagggcattgctctggattaagctttgacttaagggaatacagtttgatctaatccagaccagtaaaactctgtattatcagcaataagtctgtcttgctttcatatcatttatgtgttcagtggagtagcactattagttttcttcaagaactgcactggtgcaagaggcctagcttttgacctgtatccgtttttaacatgccttcctgacttccttagaagcttaatcctttctagcttctgatttaaagtgagagacatgagactcttcctttcacttgtatacttaggggccattgtcgggttattcattagcttaatttcaatattgttgtgtctcaggagtaggaatatccaaagagagggagaaagacttggggagcagctggtcagtggaacactcaggacagaaacagcrtttctttttttttaattaatttatattaaagacagggtcttgctctgtttcccaggctggagtggagtggtgcagacataccttattgcagccttgaactcctgggcccaagcgattcttctccctccgcttcccaagtagctaggactataggcacatgactccatgcctggctaattttttattttttgtacaaatggaggtctcactatgttgcccagactggtcttgaactcctggcctcaggtgatcctctcacctcagcccagcatgctgggattgcagatgtgagccactgcacccagcccagattttttatatattgtgttgtcagtggtaaagatgatagagaatgtctcattctgctgataggagtataaattgatacaaccacttaggaaagaatcaaggaatatctggtaatattgaaaaaccccacagtttttaatcacattcacaaaggtattctttataaagactggaaacgatctaagtgtccatctttagggaaatgggtaaagtatgacagagtcatgatgagaccactatacagccattacggaatgaactagatccatacgtcaacatagcacaactgaagggcaaaatagagtgtgaacaagcaagtttcaagatttctttaaggtattttaattttttaagcagaaaaatactatgtagtgcttatgattgtggtttccagagtgggagagagtgagggaattggtcttggaagggtacgaaaagatcttcaactttatttgccattttaaaaaattgtggtcaaatgtatataacataaaatttatatatatatatatatatatatatatatatatatatatatatwttttagacagtctcgctgtgtcgcccaggctggagtgcagtggcatgatcttggctcactgtaacctccgcctcttgggttcaagcgattctcctgcctcagcctccgtggtagctgggattacaggcgtgcgccaccatgcttggctaatttttgtattttcagtagagaccatggtttcaccctgttggccaggctggtctcaaactcctgacctcaagtgatccgcccacctcggcctcccaaagtgctgggattacaggtgtgagccactgcgcccggcccaaatttatcattttcttaagtgtgcagttaagtggcattcagcaaccatcaccaacattcagctccggaacttttctatcttctcccacctgaaattctgtacctgttaaacaatggctgctcattctcccctcccctcagcctttggcaactgccattctcttttcagtctctacaaatttgactactccaggtacctcataagtagaatcatacaatatttgtccctttgtgactggcttattatccttagcataatgtcctcagggttcatctgtgttgtaacatgtgaccagatttcactccttttaaggttgaattatttgctggtttttaaaaaaattttgaattttagttggttaatatgtggagttttgttatattattgttcgcaccttttatacttcagaaattttctttccaaaggaattggttgatagaagattataagggaaagcttactatcctgattcagatgatttactctagtttattttccgattcagtgtgaccgcaacaagggaaaacatggcttatactgtggaatgcctgcggggtgatgtgtaagtacctgtgtgtgtttaggacttctgctttgaaagaaatactaagctgctcacttctggtctttgtaatgcgtcattatgacctctgacttccattttggattattgttcataaactgctcaaaaacactgcttaccacaagacctaaagtttcacattgagagcattacagctatgtagaatctcaaatgttggctttacatttttgactcataattcttatctcgatgtcttctgtagtgatattctaatggagttcctgctcaatgtcaccacagcaccagaatttcgtmgttgggaagtagctgaccttcagcctcagctaaagattgacaaagctgtggcctttcagaatccgcagactcgtaagtacatttccagatcacatttgattctaagatactgggttttttagaagatcaatttatagaagaaaaaaaattgctgtcaaaatttttatttttatttttatttatttattgttttgagacagagtctcactctgtcacccaggctggagtgcagtggcacgatcttggctcactgcaacctccagctcccgggttcaagcaattctcctgcctcagcctcctgagcagctggaattataggtgtgcaccaccacacctggctaattttttgtatttttagtagaaacagggttttgccatgttggtcagactggagttcagtcttgaattcctggcctcaagtgatccacccacctcagcctcccaaagtgctggtgttacaggtgtgagccaccatgcctggccaaatgttttactccttgaatttgaaaatatctttttcaaaaatttgttatttagatttattattcttttgtttctaaacatttataatcatttttcatgtttgatggtaagtaaattgtttgtaagatcctagaagtttttcctgtttccttcccaatgttttgtttttgtttgtttgtttgtttgtttttgagacagggtgttgcttgttgcccaggctggagtgcagtggcacaatctcactgcagcctgaaccttctggactcaggtgatcctcctacctcagcctcctgagtagctgggactacaggcacacaccaccgcaccctgctaatttttatttttatttttttatagagatgaggtctcactctattgcccaggctggtctcgaactcctgggctgaagtgatcctcccacctcagcttcccaaagtgctgggattacaggcgtgagccactgtgcctgacccctagtgatttttaagagttgttttgcttaccccaaatcctacaccagtttattgctgctgctattattgcttactattgtattgctattattgtttagccatctcctctttattgagtctttccaaagtaagtaacttaatttttttaataggaatcttttttgcattcatattttatgtttatataatgtctaattatataatcttgacaagtacaactggtaatacaagtctgtaagcaagcgccgctgactcttgggagtcatacaacttctggtgggagcagaaatgtgcaggaagagcagaaatagctcaactcagtggytcagcatgggacaggctcccctccacatgcaggcctggggactgatgttatttcatgatgatgcttggtgtcacagaggagcattatctttgttgctcaggatttctactgaagaaatagatagaatagtacaattttagaaaagatgacctatgtgtccagagtggcttcttccccactggcggcagtgaggcaccagcctgcatctattctgcctgaacagttactgtgtagtctcctggctggtgtcagcctccaggtttacgtcttgagtccatctcccacacggccattacagtgatccttctgacstgaaagtaagccttcttattatctatgggataaagtccaaacagcatatacgtatatggccttgcgtgatcttaccccagcccacttctcttactttatgctctaccctcttctccttccagctgcaattcccatttgaatcaaattattgttatactttatgcctttgttttgtctgcttcctgtgcctaaaatgctgttcccaaatgatttcccctgggaaacaccagctcattctgtaagatggatcccacatattacttgtattaattgttttccaattcccactgcccttgccttgtacctctactgcacttttgacacactgccgacattgcacccataatactttatttcacagtttttcctcttaaaatttgagggcaggcattgtatgttccacatctctgtatttctagcacctagcacagtgcctcgcataggcaagttgccaggtaatgagcaactgaaggaaatactgcaggcaaaaaggcattgaagcaagaaagcagggaaagcaccaagcaccacagaggagtaagtcccagtggaagctcccattggtcccctgaaagctacctgacaatctccttattacctagagaggaaacctaggagtaagtaaaattcagattaaatgacttgtccaaggtcacatggcamgatggcggcagaaccataactagatggggacttcccaaaacccaggccagtataccttccaagtgataccagctaggttaaagttagaaaagtggtttaggtggactccagtatatagaagctgctgccatgtaatcttttttatttttttctcagcacattctactggcagaaactggcagttactagaggttaaataataataaattttaagtcctcttaacatatgaatgccagaagatgaccaaatttgtataggcttgttgctttctaggttttaaaaatgttgtctttactgaaagtgcatttccctaaatgcttcttcacttatctcacagatgtcattgaaaatttgcatgcagcagcttaccrgaatgccttggctaatcccttgtattgtcctgactataggattggaaaagtgacatcagaggaggtaccaataaaacatattttgaaatgtgcttgtttttcacattaaattgaacatctcccatttcaggtttgtttgttaatttttccttttatcttctaactttaagaaattcagcgtgctagctttttcatccacctgctttttaactaaaattttatctgaacaatttttgtgtctcctttaagaaatgttttcatgactaaagggacatgatcattacagaaaaattaaaaagtaaaatcaaacaaaatgaagggaaagaaaacatctcacatacctaaaggcactcagtgttaatacctggtatattttcttctaaaccgttttctgtgtgtatgtatcttttttgtttgtttgttttaaatacggggtcttgctgtgttgcctaggctggtcttgaactcttaagctcaagcagtccttctgcctatgcctctcaaagtgctgggattacaggcatgagccattgcacccagcctgtgtatcttttttaaacagtatttaaatgtttaagtatcataataggggctgggcccagtggctcatgcgtgtaatctcagcactttgggaggccaagacagagggatcacttgaggccaggagttcaagaccagcctgggcaacatagcaagaccctgtctctacaaaaaaaaaaaatatatatatgtgtgtgtgtatacatatatataaaataggtcctttgactaaaactctttggtctctctgaatttgtaaataagacttgagcccacttccttagctcctgttccatcctcgctcactcattcacgttcttcagcacaccagcctccgtttgctggctataggggtttgtcacatgccacagccatatgtgcatcttagaactttgtttccaaaacatgaaacattgaatgctaaatctacaagtgtagatatgtgcgtataatcttaatttcctattcctaccacccagacccaaaaacaaattttatcaaaagacattaagagaaaaatttgtaattatcaacaccttcaaagtatatctgactcaaaaattcaaggtttttattctcgttttattcttagttagctgttacagaaaactaaactgtatcccttgctctttttgacttatcaattaacagtttgatgcctttcattcatatggcacttttatttagaaattttaacttacatcatccaacttgaacaggcagccgttttcataagactggactctaatgagttttgaaatttttcagaaatcaaattcaccctcatgaagatgtgtcattaagttagctaaaacttagcaaaagtttatctacaaggatggctattgtaatactagtttataattgtgaaaaattagaaacaagttaatatccagcattagggaactagttaaataacttatagaatggaacagtattcaaccattcaaaaatattagttgatacataaaactccacagcatgttgtcacataaagcaatttatggattaggacataccaaaaggtcccttttttttaataaaaggtatgtatgtatgcattatagacaaatatcaagatgttaactgtgataacttggttatctcaaagttaatagtattttttaaatgtgtccctaggctaaaggaaactctaaagaaattggcgctagaatacttggagcaatggcagcatcaatagaaaaacatcaatagaaaaagagtatgactttccaaggttactccataggtacagacaccattcattttagggcacggattatgataaattgattaaaagttcagtttcattactttagcccagtgattctcaaaacgttatcactttccttcctgaggagcctttctagccatttttttctaaacctcttacttttaataccacagatagagtttatgtgctgtatatttgtactttttacatagaagtcgtaagttttttttttttcttagttaccccaaaccaattttcacccatctggaaaggatagcatttctrttgaaagtacatgttttagccctacttttgtatattaagcctaaggtggtaatataaaccagtgataaccaagtctcaccaatcttcagatcgcctgagtggttgattggatggatgggtagttggtcggttttaaataaggattctaggattccacatttaatattttatatcagtctgtagggtaagtcccaagaatgggggacagtgaccgtttttgtttttcaagctgagtaattgtgatcttacagtttcgacaccctggtatagacaatgacttcatggtcagaaaagctttatagagattggcttcaaagatggacgagaagggtgttgtggtaaaactctgttagccctgttatagaatgttaatagtgcttcattactacttatataaacacaaaagaaacctgacatactacgtaagctacattataataaaaatcatagtccacgttttcaagtttaggccagtrtatgctctaatttctttttattcctttttttttttttttttttgagacagagtcttgctgtgtcgcccaggccagagtgcaatgacacgatctcagctcactgcaacctctgcctcctggattcaaacaattctcgtgcctcagccacccatgtagctgggattacaggcgtgcaccaccatgcctggctaatttttgcatttttagtagagtcaggatttcgctgtgttgcccaggctggtctcaaactcgtggcctcaaatgatccgccagccttggcctcccagagtgctgggattacagacatgagctactgcacccagcctctttttattccttttataaataacagctttgttgagatgtaattcaccatactatacaacctatttaaagtgtacacaattcagtggttttcattatattcacagagttgtgcaaccatgaccacaattaggttctagttcttttaagcaatagtttttataataaaatcccagggtaattcacctcagttagtaccttgtagttcattacagcaacttataaggccttrtaagtatttattttcttccaaactgtacttttatgtttttacagctttttatatttatgctaatataacctaataagtgttkttaacttcctcagttacattacttcgttcagaaccatttcacaagtgcaagaatggctttgattggacttggtaagtttagagtattgcctgcctgtcagtttgcttccttaagagcagttccttaaactgtaattacgtgaacataggattgaacaaaatttgaaaacttcggccttctatttatgtcagacaggcaatatatcataggattttaattgctagtcatttgttttggaaagcagaatccaacatttaaatttgtaaaccactggctttaaattctttacagtatttgtaaaacctgtgacaaaggtgaatttctcaaagcaaagagcttttacaaacttttttaaaaggaagtacagcttactagaaaaacaggcaaagggcatgaacagacagttcatgggagaaatatgtttgtatatgtgtagccaactatctttgttttaaatgatcagcctcactaataattaagaaaattttaatctgtgatgttggcaaaattaaaagatggactctgcccagaattaaccagggtatggagaaataggcactctcacaaattgttagtaggaatataaactagtacaacattttgggagatctttttgaacatatctgttaaaattctaggctgggcatggtggctcatgcctgtaatcctagcactttgggaggctgaggcgggcggatcacctgaggtcaggagttcaagaccagcctagccaacatggcgaaaccccgtctctactaaaaatacaaaaattagtygggcatggtgacacatgcctgtaatcccagctatcggggggctgaggaggagaatcgcttgaacccaggaggcagtgattgcagtgagctgagatcgtgccactgcactccagcaagggcgacagagtgagactctgtctcaaaaaaatacaattccaaatgtttacactcatagacccagtgacttttaagaatttgtcttacagaaacattaggtcaagtttacaaagtagttgcatgagaatatcatttgtaatattttttgttttgttttgcaaattacagcttaagatataatttacatgctataaaattcacccttttgaagtgaatagttctgtggtttttaacagattcaactattaccactacctaatttcagggtgtgttcatcatcccccmaaaagccccatacccattagcagtcactccccattctcatcttccccctgcctgtggcatccactaatctactttgtttttgtttttttttttaaagagatggaggtctcattctgttgcccaagctggagcacagtggcacaatcatagctcactgccttgaactcctaggctcaggtgatcctcccacctcagcctcctaagtagcaataatctactttgtctctatagatttgactattctggacatttcctataaatggagtcatacgatatgtggccttttgtaactggcttttcttacttagcataatgttttcaaggtccgtccatattgtagcatgtgtcaattcaatgtcttattcccttttatggctcaagaatactccattaccacattttgtttattcattgattggcatttgggttgtttctaccttttggctgtcgtaaatataaacattcacgtgtacatttttcttaggaaacctgtttttagttcttttggttatgtctaagaacagaattgccaggacatatggtaactctgtttaaccatttggggaactgccagactgttttccaaagtagctgcaccattttacattcccaccagcaatgcacaaaggttttgatttctccacatcctcaccaacacttatcgtctgtctttctgattatgaacaacctactgggtgggaagtggtcattgtagttttgatttgtatttccctaatgacaaatgacattgaacatattttcatgtgctttttgtccatttgtataactttttttgtttgtttgtttttttgagacagaggcttgctctgttgcccaggctggagtgcagtggcgcaatctcagctcactgcaacctccacttcccaggttcaagcaattctccggcctcagcctcccgagtagctgggattacaggtgcatgccaccattcctggctaatttttgtaattttaatagagatggggtttcaccatgttggctggactggtctcgaactcctgagctcaggtgatccacttgcctcggcctcccaaactgttgggattacagatgtgagccaccgtgcccagtcaactttggagaaatgtctattcaagtctttgcccatttttaagtttttttttttaattgttgagttgtaaaggttctttatatattttggttactcaagctgttagcagatatattatctgcaaatattttcctgcatttcatgggtcctctttttactttcttgatacagtgttctttgatggacaatgcaatgttgttttaagagctaactattagaaacatgctagcgtccattaggaggggattgatcaaataaatggtggtagagccatagaaagggattctttataaccattaaatatttgatgtagactactcacttagaartttgtaaattatgaaagataagttagaaacaatatcaatagaatgataccattttagaaataaattgaagataatattaactacacagaaaattctagatgaatagtaatactaagtatatagtaaatagtttagtaatagtaaactgtaattgggtatctctgggagagtggcattatggcaggaagactcttatttattttgtagtgttaggattttacaatcgtatttttaaaacaaggaaaaaatattttacgattgtgttttagtaattgtggttctagctttgtttttgcttctgttgaaacaggtgtgagtcatcctgttctaaagcaagttgctgaacagtttctcaacatgaggggtgggcttggtttatctggtgcaaaggccaactaccrtggaggtaagcatttcattctattagggttaatttatcagaagggcgtttccccactagaatagcatattgaggtggaataggcctgaatatttactactgaacagtctcggcatagaattggatggcttgggtgttgtattttgagcatatgttttgtgtgtgtttggggacaggatggcatggggaaagcaccgagcygcagaaaagactcgtgggttaatactgtgttgtaggaaatactggagaatgaaaccartggtgaacaagccattttcttcttccctctatccttaatctggccccaggtgaaatccgagaacagaatggagacagtcttgtccatgctgcttttgtagcagaaagtgctgtcgcgggaagtgcagaggcaaatgcatttagtgttcttcagcatgtcctcggtgctgggccacatgtcaagaggggcagcaacaccaccagccatctgcaccaggctgttgccaaggcaactcagcagccatttgatgtgagtctgaacagttggtatctctctttttgctttcaaaggctcagtatttaagatataattctgataatctactcttaaaatgtaagacaaacacacagaaaatctttgtacaattgaagagatagccaggcttgattttagtatctttgaaggcctatcaaaaactcactggcttttccactttgtctattacttgtcattagtaatataaaaagaggaattgaatgcttagaaataaagggaatccacacatccgttccctttagaataaagttgtagatattaaactttcccctagattctaactagtctttttttctagattttcttctgtccgcttctgttcttttggttacttcctgaatctcactatttgttttccaaccaagtggacaagatgaacaccaagaaattgtttacagactcactcattcagcttgagattaaatttgaaaagaaaaatgagaggctgggcacagtggctcacaactaaaatcccagcactctgagaggccgaggtgggcggatcactggaggtcaggagttcgagaccagcctggccaacgtggtgaaacccccatctctcctaatccaatgaagtaatttaatagaaattcctagttcagaactcagccagaaatttagagtataaataggatggcctcagaattataattaaagaaattgaagtccaggccaggcacagtggctcacgcctgtaatcccagcactttgggaggccaagttgggcggatcacaaggtcaggagatcaagaccatcctggctaacacagtgaaaccctgtctctactaaaaatacaaaaattgtctgggcgtggtggcgcacgcctgtagtcccagctacttgggaggctgaggcagaagaatcacttgaacccaggaggcggaggattcagtaagctgagatcgtgccactgcactccagcctgggtgacagagcaagactctgtctcaaaaatatatataaataaataaataaaagaaattgaagtgccttcttatgctttacrtggactgagccaatggttctccaagtttattgtacataagaattacctggaacacttgttaaaaatctgggcttccaggctgcatccacagggacctgagtcagtaggtccattttgggaatctgaaagtttgtatttttaataagaacttagataatttttatgtaaatggtccacataaacactgcaaatcgggttcaccctagagagctaaaagctctgctcaaactagataacaatatccctgttattcagaggttaaactcttgatagcttggacatctggataatgaccactaagcagaaatttttctctaactttctgacatgagtgtataagagaaatgaaagtaaattggtgaaaaagtccctaccaacagcagagagaagaaacctggtctgcctaatgccaaagcctatctatattataataataatgtttgcagattagtgtttgcataaacctttaatcatctaaagcaggttagaaaatacccagcataaaggaaagggagcagtcattttagaaatatttaaatgaaaaaacaaagccgtgatagttctgaaagaggtaacctatttacagaatacttcrgttcgtgacagaactggctaagtaaaatattaatctattttgtttataccgtgaaggtccaagttttttctaggcaaacttaaagaaatcgtgccctgttttacttggtagaatatcatacagtaaagtctcattatctttcaggtttctgcatttaatgccagttactcagattctggactctttgggatttatactatctcccaggccacagctgctggagatgtaagttgcaaactcaccaaacttctttcatgaacaagttatttctcccccccgccataaacatgttttcggttaaaatatggaatgtttgaatgcagtgcaatgacttatcagagctctgtatagtatgatgtcattgaagcattatctgctatagggaaatttacacatgtatactaatgcttccakgaaagaggagagaattgcctccttcatgttttggttctggttggacaagttgcattgagttggctctgagacatctaaattgagaacccaggagaggggaagaccaggaggtttatttgcaagtcttcagtgtagagattgtgttgaaatcagggatatgtgtgaatgattgtaggaaaagaaaactaaagctcaatttctgggaaacaacaccatttaaggagcaagtggctaagaaaaatggcccaggtaaacagaaagaaaaagagaagctgatatatttgaaggataggaaagagagtatgtttaacaccattttgacccacagtgaaataacattcattaccactgagaagtctggtagtttcagcaagctaggacatcatgggtgatcttaacagttttgactagagtagtggaaattgggtaaaatgtgtagtgattaaggaatgaatgacaagtaagaaatgagaggttggtgtgggctagtggagcttagacattcaaggagcaagttgttttaggagagtttacactgagagattaggttgaaagagacatactgagcaaaaagatcggagcagatatcggagatagaaaattataaatggctcaagtctgagaaaggaatacttgggatccagcacacaagtggaccttttagccttacagacaggctaatattggaagatattgggaagatggggaagtacctcctcagtgagacaggaggctaagtcatgttttgacagacgtgagaggaaagtttaaagaaagtagtgaagtttgggacagacaaatagtgaggtacacaaaaagtgggtattcgctgtagtgtagatgtatccttgaaatcagcgaccacaaattcatagtacagtcagtcagcactgtcatgtaatttttcttcagttgcattcagaagcctaatagagaaatggaggaggtaggtattagggttaatcccaggttggaatcctgcaaagtgggcaggtgagaagtatgaggagatagcaagggagttgggagcattggcaagagtgattaaaaggatgattcagggatctaggctcaatagagaagtgaagccagagggggcctgataaattgaaagactggacaagtcaaggaactagagatcttgataaagtggaagaataaggatagtgagattaaagactgaggtcggggtcttagaattgagggcttcagaggtatgcaaatttaggctatgatcaggtctggggtgtggctctgaaaatgggcagctaaaatgaaggggaaacagaggtcctagaatttaggtgatcagagggaaaaataagtagcagacccagccagcactgggatggagaaaatcatggtcagatttatttatttattcaacaaatatttaccaagtacccacatccccggaactttattctttctttctttttttaaataccatacaaggattcagattccttcttgaccctggcttacaaagtatggacaagccttacaaattggctgtgtatggattactactctcttcttagtgaatagtaagagatagcagtattaatggcatgacactgcaagagtctggggaagttttaaaggtgcttattctttatgggtgattagaaatccatgtgtttggccgggtgtggtggctcacacctataatcccaacactttgggaggttaaggtgggaggatcacttgagcccacacatctctacaaaaaaagctaaaaaattagccaggcctggtagcatgcacctgtagtcccagcttcttgggaggctggggcaggaggattgtgtataaacagctgctttatgaacataggaagaataaggaacccatagtgatgacagcattccgcatggacactgtgctgtttgtctggaactaaccttccatctgtgtttttgcctcagtaaagaagtgtgtcagtgctgcaggagactctggtactgaccacagatgaccaacttttcttatctstcctaggttatcaaggctgcctataatcaagtaaaaasaatagctcaaggaaacctttccaacacagatgtccaagctgccaagtaagtctcagtattaactgtgttttatgtttttgttatttgaaagttgtattcttttcagattataacaatattacaatctatgctcataaggactgagaagtacagaaaagcgtaaaaagggaaacatacccatatcctaccacctaaagatataattgttaacattttggccaggcacagtggctcactaatcccagcactttgggaggccaaggcaggtggttcatttgagaccaggagtttgagaccagcttgggcaacatagcaagacctcgtctccaccaaaattagagaataattgttaacatttttcttagtttattgatcatgcatttttaaacataattgttaatattgtatatatagatgctgcttgacttacactggggttacgtcctgagaaatgcgcatatcgaaaatgcatttaataccctaataacccagtcatccagccaaacaaacataagtcaaaccatcataagttaagttagggaccatctgtatacttttttatcttatttaaatagcatccttattatagaagtttgaaaattacaaataaaagacaaaaatgatctctgatttccctagcaatgattctgtttccattgattcaaattactaaaaatttaaacaatattcattggtgtgtcaaaatacacttgtgcattttctgcagttataaagatatctttgggcttaaaatatttttgtgtttcgtattactttcttggtgtagattcccaactaagttaagagttataaacataacgaaagactccatgttagagtgtgtgtatgtgtgtatgtttaaataatacatttgactaggcgcagttgctcatacctgtaatcccaggactttgggaggctggggcaggaggatcacttgaggccaggagttcaaccagcctgggtaatgtggcaagacactgtctttacaaaaagatatttaaaactagccaggtgtggtagtgtgtgcctgtagcctcagctactcaggaggctgaagaggggggattgcttgagcccacgagtttgaggctgcagtgaactaagatcacgccattgcacactagcctgggcaacagagcaagaccctgtctcttaaaaaaaaaaaatgtatttctaagtcacaaatctaaagagattgtaccagtttataatcataccaccagtatataagagtacctattctacaatagtttctttcttcataactaatttatacccaaaaaagatctgattttgttttgttttataagaaagactaaaatacttgtctgctatttggcaatttataaatccccactgtccagattgaaagtgctatcaacactcctaattcattagtagttcgagggtttctctaaaagagacagacttgggacaaagttggaaatcaacctgcattttcatacagccgcttaagacatttaagtttgactccatctacttagaacaattcaaaatgtgaatcttgcaactccagtggtcgttatgatcatttagtattgcccacaggggaagcagaattacaacccaggatggaacaaccttttggtcatttctgttcccattagtattgttagttttgttatgctgagcacactacaaagttgcatctcttgtataagtacaacacaatttattaaatattgtatacatagaaccaagaatcgataggatgcagggctgcttgattgtaccagaaacaaaacatgatgagaatacattgaaacactggatttacttaagaaaaacctaagtttttcaaatctaatttatttaagaaaacgtattttcttaataagtgtaacacagttcttacaaggtatggtaataagcagaaagtagaattttgaatattaatgtcaaagtatgttttctgccattttgatggagttgatactttttcttgtaagttcttcctgtagtgaaagagagaaagtgaggtgtcattgccgaaaggacacactaataacctcttggtagtttattgcaggtaaaatcattttttaattaagctgacaacgtggtaaaactgcagcattaaattgtaattatgtttaaatggaagtctttctgtagagtgttaaaggatgataaacgtttgaggttcaaataactcgactgtcttatcaaacaccatgtctataagtaataagtttctgggagaattgtgaattggattttgttttatttcaagtggatgcttttgtgcccatatttaagctgccgttgcttacaagacctgtactgcccttccccacctgccttttccatcataccctatgctcacagacaaatmtcagcaagaggcaggagttgcttcactaatcaaaaccttacattaaaatagttttacctagatctaagttctagtcccaaatcaaaaagcaatctgtggagttttcagtataatttcgtactgacagctttccaaatagtaacgtaaacggttcacgtacttggtgaactgaagaaatagaatggaggccattagcactgtaagttgttagtttgcctgtttaccaaaaatatgttgagtttcggggcacataccttaaaattgccctgtttcactgtgtaagaggaactggcttgactacttcacccttggtgaaaacaaacaggccctaaaagaggcagcaacagctgaagtggatatcacagaaataaacagacagcagaagctcttcagacacccccgaaacctgccaaaactcacaggtaatacaagtgaaacgatagcataagaagaaaataaacatgagaatcttcaaactacaagcattgaacggtatcctccatccaagaagagaacccacttcatacaaggaaaaggcaaaaggaaaaggtcaagactgtgacctttataacactgtgaccccagctgtgggccaggtggagttgtctgtggtgacaccaagtacaggcctgacaccctggtttgacagaaggctcttcaagatccctggtcttcacactgtagcagccaaaaggtaggtttacaatatacactgtccccaacttgccatggatcaattataatttttcaacttgactatggaggaaaaccatcgcaatttcagcttccagtcatgggtcacataacgatggggatacattctgagaaatgtggtgttaggtggtttcatcactgtgtgaacctcagtgttcagacaaatctagatggtatagcctactacacacatgggctctatggtatagtctattgctcttaggctacaaacctgtatagcatgtactatagtactgaatactgtaggcagttataacacaaaggtaagtatttgtgcatctaaacataggaaaggtacagtaaaaatacagcacaaaagataaaaaaatggtatgccatttttatggcatagctcctgctttcgagtgagtcagtgagtgagtggtgagtaaatgggaagggctgggacattactgtgcactgctgtagatacttaaacactgtaaacataggctacgctaaatttatttttttaaaattgcactacaacattatgttgtcagtaagtaataggaatctttcagctccctaataatcttaacgggaccaccatcatatatgtggtccatcattgaccaaaaacatcattatgtagtacatgactataccttgaatttcgatcttttcctaggctagtgatatgcagtacatgagataatcaatgcttccttacaaaatgggcttatgttagaagacttttgcccagctgcaggctattgtaagtgttctgagcacatatgagataacctgggccaagctatgatgttcgatacgttaggtgtattaaatgcacttttgactgccatctcagtggatgacagccttctcactgacagcagagagatcttcctcactgtgccagtgggcaggagaaagagcatgctgcgactggccagtgacatgcagaggatccagattgcacaaccggatccagaggccttgggaagcattagggagctctccagctgtctcactcaaatctgtagcagcatatggacycacaaatggaggccaaagtgggccctcaattggacactttggcaaccctgaagagacttcttcccttcagacttactgttttagtatgttccagagaagggagtggcattcttcttggggaattcaggaagagggagacacgctgttactctatccattaaataaagctttgatgttcacagccccccgccaccactcagaaaaaaaaaataattgccttgctctctaaaactgacttctgccttttattggacaggaacaagctgaaagctggatacctaatgtcagtggagtcttctgagtgtttcctggaagaagtcgggtcccaggctctagttgctggttcttacatgccaccatccacagtccttcagcagattgaytcagtggctaatgctgatatcataaatgtaagtaaatgaaaacttaacgatttaacaacagagaacttaaccttaatgatccaatttcagaaggatgcataagcgtccttgggcagtgtattattctyatgtttggtgctcatctacttaatgtggaggcaggagggctcattcccataagatccgcaacaagcttccctgtcagctcgagtatatgtatcttcctccttcaaataaactaccattaggttaaactgtgatgtcagtaagagggctgccatccactgagatggcagtcaaaagtgcatttaatacacctaacgtatcaaacgttaggttaaactaatggtagtttataaaatgggcttatgttagatgactagaagtaaagaagagtcaaatattagcagtttcatatgatccaacctaaatagtgaagtttgctatttttcctcttcagtcctagcaatatttcaccatctagcatcttaagattttctttactcttctcagcctaggacattctcttgttcttgctaatttttttttcacatatattattgttccctacaatattgagctgttttgagggcaaggactatgtcatgtacttctttgtgttccctgctgtgcctaacaagcacatgacctacagaattaatccaaagtaagtgggttttccccattttctacattaaacttgccaacttgctttctactgtagatgtctcggccatcttctcaccaacaggtctaccttgtatagggacagtggggataagaaaaaataaaaaactaagctgggtgcagtggctcattcctgtaatcccagcactttggaaggctgaggtgggcagattgcttgagcccaggagttcaataccagactgggcaatgtagcaaaaccccatctctacaaaaaagtacaaaaattagctaggcttggtggcatgcgcctgtagtcccagctactcaggagctcatggggctgaggtgggaaggtggcttgagcctgggaggcagaggttgcagcgagccgagatcatgccactgtactccaggctgggcaacagagtgagaccctgtctcaaataaaaaagagacaaggctattttaagatagtaaccctgacttgatttcacttcgccccaatcgtcatttcatactcttcttttttttttttttgagacggagtcttgctctgttgcccaggctggagtgcagtggcgcgatctcggctcagtacaacctccgcctcccgggttcacgccattttcctgcctcagccttcctagtaactgggactacaggtgcccaccaccacggccggctaattttttgtatttttagtagagacggggttttaccatgttagccaggatggtctcgatctcctgacctcgtgatccacccgcctcagccttccaaagtgctgggattacaggtgtgaatcaacgcgcccagcccatttggtactcttttaaatggctgtcttcatcttatatcctatcattatgtgcgtcccaacccgactgcttccaccaccacctctccttcatagtaataagataagctggcctgacagaatatgggggctgctgctccacctacacctgactcatgatactacacttaaccagcctttgaacttggaagtagtggcataaagaatcctctagggtatcaagttttacttttaagttaacaatcaatgtatttttattgacccagactatttgccattgtaataccgaaacaggaaagtatatccctgcctgaagccacactactctatttgacagtgtcagtgttgttttccttatctctctttgaacagctaccctcttaccagtgttgctcttgcttggttcattacacatacaatgggactttcagagaaacagctaagcttttcctcccacactgtcccaaattaaagcaccagccatctcctagttaattttcacaacagctattatagtaattgctggcttagaatgtcctatcgaaggccaggttggtggctcacgcctgtaatcccagcactttgggaggttaaggtgagtggatcacttgaggctaggagtttgagaccagcctggccaacatggcgaaatcccgtctctactaaaaatacaaaaattagctgggcatagtgatacatgcctgtaatcccagctccttgggagggtgaggcagagaattgcttgaacctgggaggcggaggctgcagtgagccaagatcgcagcactgcactccacactgggtgacagagcgagactccacctcaaaaaaaaaaaaaaaaaaaagaatgtcctatccataaattcttgaaatgacaaaataagttcgcctgcttgatgatatatatttttatttttgttaattttgtcttttgtttgtttctttaaaggcrgcaaagaagtttgtttctggccagaagtcaatggcagcaagtggaaatttgggacatacrccttttgttgatgagttgtaatactgatgcacacattacaggagagagctgaacgttctctcagcccagagcagcaaacacatgaaagtcagaagtctctaatatatcatttgtcttttttccagtgaggtaaaataaggcataaatgcaggtaattattcccagctgacctaaagtcaataaaacattctgtttaagtgtttttcttacgtttttctcaatgagttaatcaacaagtatttattatgtgctgatatctttgttttagatgctttaaaggagacaggaatataattattgagtatagaagcatcagaaactattaaaattaaggctaagtggctatcggggtaaatagtgccagattactattggtggcgtttaagatgaaagcaagttcaaaatttgtcattttgggtgtcaacagctaaatggtctggtttttacccctgttttgccttttttgcaataaaattatttccaaaaaacatacatttcctatcaatcatatcctatattcccattcattcatttttttatgtctgatttatcttcattgacagagttttgtttttctctcatctcctgtctctcccttatctgttactatcctgtctcttccaaataattaactctcaattcaacatttacagtaaaagaagggctaaaaaggggaaaaaaaaagaattctaatgtgaataactagccaaagaattatgtctcttagttattttaattatagtacttgaagtttaccaaaaaaaagagagaaactaaatatttaaagaaaaatgtagtgtttacataaagtgacattctctactatgttcagacattctgatattggatttctctacggcattttctaaaagaaagaaattcttctcaaaaaggagggtcttattctgaaaataagatttgtgaggcctgcaagaacccaaggaagtctttagataatcctgttgaagaacatctctaaaggctttataacgcagtcataagagaagagaattggtgagtctacagacagtccttgataagtacagcaaacttgtgcctggtgaggcacaaaacttgggtgtctgcaagataaatgctcatatgaccacagatttgctaaccaacctttgataccagttgggctttaccctcttcaacttgggcacaatcttccagccaaaatgcatctgaggtagaggaggtagaggaggaagagctttcattgtcttgcttcaccattatccagtatggagaaggggccctcacttctttcttgtcgtctctgtgaatcatcacgtcacaattaatgtcttttcctacactaatagtakggttcttcttcttatatccatgccagtctctggagatggatattggtctccttgcagggtgatgcacagttgaccacggatatctataatattgaagtcttttatctaaatctacattttcattatcatcactgcttgtgaaagattcatcttttgccagctcaattttctttggtgtgctgaaatgaaaagaatagtgaataaaatagattcttcatgtctaaacatttatggtcccctaacaagatgccttataacttgctttgactcataaaagatacaatttagctttagcattacctttctgtgtcattgaaatgtttctcttttttaaatcgtcttgaaatctttttccatttctaaatggaaatcaaattctgccttaaattacttcaccataccttaaaaagttttgcacagacttatactagactactgaccagaatattaggaggtgttaaagggtaggttaatttcactgcagctaaagtgacggattcaacctggccatctcctgagaactctattcttgtggctcacgtggcattaacacaacattactgatttccagaggagtcaggaagtcaggaaatagtgggccttaaggatcttcaacatcctagtcattagtaagtcttagagtcttttttttagagagggtcttgctctgtcacccttgctggagtgcagtggtacaatcatagctcactgcaaccttgaattcctgggctcaagtgaccctctggcctctgcttccaaagtagttgagactacaggtgtgtatgctgtatgccaccgcacctggctaatttttatttatttttatttatttatttatttttaaaacaggatctccctatgttgcccatgcctgtctcaaactcctggcctcaagcaatctttactttggcctccaaagtgctaggattacaggcatgagccactgtgcccagccaggtttttgttgttgttgttgttgttgtttttaactttctccaattattgactttcttgattgttgaaactaggtggtgcttgcctgctagcacctccaggtctctgaactttcctaatgcctacagtacctgtgcttgctttaactttccagaatgaatgctctgtcacctgctttccctcatcctggtgctattgcccagcagaaccaaaactagatctttgtgattacaaatctctggtacattctgccctgctaaaaggaaataggtttcttccctgccaacctgttaagacttctggtgttatcactaataaccttggcagtctgcctgttgtatttgcttccaataatttgaatggcttttccaaaagtttatctcttccagtaataaacagttgataatgagtaatttttactgagagccactagtcttaaatactgattttctttgtctgatttgccttcagacacacctaggtcttcctgaacagcacatgaattttttttttaaatccaagtattagtaacttttttttttcagactgcagggggaatccttggcaactctgatggttaggtaaccataaaggacaggtaaattgtcattaggtaataaagccacaaccctgcagaggtcaggattggctagaaacaaactttctataccacttggcctacccagagcgttacatggagaatttctccagtgtgtatacccagtgccattttctcctggaaaagtttatactagctttgtgaaagcatctttttccttcttctttccctgccgtgttatacataagttactaaaatgcctcagatatgggtactttgcctaattaagaaagggaatcagcaggtgcttggtattgtttgtgggttttcgcctcttacttaagttgtactgttctatcttttctttgcttttgaatggtcagtctaccatccttagaatttaatattctggatctcaaaactcctccatgtaatgaaaatgcttagaacatagttgttatgtaatcacatgagcccaggcttttagagtcgtgccctccagtgtaggagtcgctgagtaggatttgattgtgagttgtgatcgtgctactacactccagcctgagtgacagagtgagaccctgtctcaaaaataagacttttaaaattaaaaattaaaaacaagtgaaccactgaccacatgaaagtcctagggcaattttagcaaaacaagacagactcagtccctgccttgatggagttcacattctcccagggaaacacagtgaacaactgattacacagattatttcattaaaattgggataaatgtgaaggagcgagctgtgagagcatatgtcaggtggacctgtttctaggaagaccccttggagaagttacactggagccttcaagggtgactactgaagagcaaagttacaaacatgttgcacacagagaagagcaagtgcaaagaccctgaggcaaaacaaaaggcagagagctggaagctaaagggggctagagaaggatggggaaagcagtatgagttgaagttggaatggtttgcagaggccagctgaaccccatagagcatcattggccaatgtgaggattttgacatttatccaaagaacaaaaagtcttaagagattttttgcaggaacatgccaggatcagatttgcattacaaaaagatcattctggccaggcttggtggctcatgcctgtaatccaacactttgagaggccgaggcaggcagatcacctgaggtcaggagttcgaaaccagcctggccaacgtggtgaaacttcgtctctattaaaaatacaaaaattagctgggtgtgttggcatgcgcctgtaatcccagctaccctggaggctgaggcaggagaatcacttgaacccgagaggcagaggttgcagtgagccaaggtcacgccactacactccagcctgggtgacaagagcaaaacctcgtctccaagaaaaaaaaaatacagttttggtgataatacagtttgaaagtaattagcatgtggatagtcatagaaaccacaggcatcaatgaaactggctaggagaaaggacaccaagaggaaatggccagaggtaacaggaaaatcaggggagtgtggtgtcacagaagcctgggaagtgctatttcaagaagagagtgggtggaaattgttaagtgtctaatgctgctcagaagccaagcaagataaagacagaagaatctagtgggatcagaagtgtgaaggctatgggtggccctgggaaaaggactcagccaagggatgaaagcaaagcctagattgaagtgggtggaggagtgtctgggaagtggcgtctttcgaggaaacagaggtgtctaatacagcttttagcaagttgggagtggatgcaaaagactccagtggctaaagagggtagggagaggagagtggactgaagataggatttgccaagatgggagaagtttaaaaaggcttagatgttattgggaaggacccagagaacaaaaagttgaatacggaaaagaaaataggatttgcaagaagcactttttttttttttttttttttttgagacaaagtctcgctctatctccaggctggagtgcagtggtgcgatctcggctcactgcaacctccgactccctgattcgagcgattctcctgcctcagcctcccgaatagctggaattacaggcacgcgccaccacatccagctaatttttgtaatttactagtagagacggggtttcaccatgttggccaggatggtctcgatttcgtgacctcatgatccacccgcctcagcctcccaaagtgctgggattacaggcatgattcaccacacctggcccacaagaagcatttttaagggctgactcgggaaagaggggcaccatacaggtaggcatggggacaaaattcccaaccgatgacttgttttttaactccaggttgacttcatcgtgctttctcatattagatcctacagatctaataccagaaacccaggaaattactctgacagtgtcaccagtcctcctgtcatgatccttatcatttgataattgtcacattaaaccatctatgcctcacaggccctgggattctgtattataacaaagagttcctaaaatgaactatttaccttgttactgggaatttggcctcagggattaaatcatatatttcttgccattcttcaggaatgttaataaaatctcggtaaaccttgatttgtagcactgttccaatagtgatatgttgcaaaagctgtaaaaattctcgaagagtatatcctaacacattggcatggccaacactaatcagaacatcacctgaagagggaaaaaattatgtatcagtaaaactagaggtttaaagggactatattgatttctggctttattgtgaggtatttcattttatgggttcatattgttgattctttttgaaccaaaaccaggcttcagccttttttttttttttttttttgagatgaagtctaactgtcacccatgctggagtgcagtggcatgatctcagctcactgcaagctccgcctcccaggttcaagtggttctcctgcctcagcctcccaagtagctaggattatgggcatgtgccatcaagcctggctaattttgttttttttttttagtagagatggggtttcaccatgttggccaggctggtctcaaactcctgacctcaggtgatctgtccacctcggcctgccaaagtgctaggattacaggcatgagccaccgtacccggcccagcctttatttaataaagatgttcatgtccatgatatgaatgtcctttgcatactgaagaatgtatgcaagatgtttcttaatagcagtatattggtagacattatatgatgtttttgagacgtttctgaagttcttggtgtgacagaggctaaaaaacatttataatcggaaccagctgttaggattctaaaaatagattagtttcagataaaatgaatggctattactagaaaagaaaaaaccacttacactaagtggtgaataaatgacctactttctattatacctgcctggcaatttccagtgccctccacagttaatagaccatattaaacataaagcctttcattttaattctctacccttgtgcagtattagttgagcaaataattctgtataaaacattg

SEQ ID NO: 94229 - DNA, 255379 bp, Homo sapiens
gcacttatgttttgaaaatagaataaataataagaatttccaattaaatcatgtctggtgccaatgtgcaaaacttcacatgtgtttttgtgattggagtttatttcatggctttattctacatactctgcttaattatacagtacagtcaaagctcattcattgggttgaagtagaataatattaatatattaatacatatataatatattatacatttcataatatgttagataatatatgtaaagaaatgcagtttaatcattcaaatacatacccactcaaacaaggcttactaaattcaagcgggcttattgacatctgtagggaacattttcttttcttttcttttcttttcttttcttttcttttcttttcttttcttttcttttctttttttttttttttttttaagacggagtcttgctctatcgcccaggctggagtgcagtggggtgatctcggctcactgcaaccgctgcctcccggattcaagcgattctcctgtctcagcctcccgagtagctgggattacaggcatgcgccaccacacccagctaattttttttgtatttctagtagagacggggtttcaccatgttggccagtctggtctcaaactcctgatctcaggtgatccgcctgcctcagcctcccaaagtgctgggattacactcgtgagccaccgcgcctggcctgtagggaacattttctgatgaatgagtaaaacatttttactcagcctttcaattgtgtacaaatggtgcttcttccctaatgaagggtattttaaaacaacttgtttttctaaatattaaaaatatttggcagaatcttgtttgtttatactattcattagccttttctataacaggatttatccagcaaggatgaacattgtctctacagttccatcctggttaatgaaattttactacattctgggaatcttacacaactggtggggcaaaagttgttcttcaccacagctggcaaaacctctgccattcctttttctacttaccaagtacctagtgtctgcactaatgcagtggagattattttccacatgtagtcttcatttcctttttatttatttaattttaaaaaaatacagccatcaatttttattcttatatttggtagacattcatttcctttttaacttgagtaacctcaggtgttggtttgtccagggcagcccccatttatgcctgttttactggcataattatcaatagcactgtgtcactctcaaaaaatgtctcagtttgaaagatatggtcaccctatatttagcagatgtgtgatttcttttaaggctaagccaaaaaaccaagaacttattctcaaaccactagtagtacttgtgcagtagtggtatgggggtaaggatgacagtagggggaaactcccttccccaccaaatatagaaatatttggcataatggctcttaaataaccaatatttgagcacataccaaatgccattgttatataggcacttagcgtgagccattttatcttcacaattgccatgtaagatagatactgccatcttacaagtaagctacctgaggcactgagggtttaagtaaattgccccaaatcaatcatctaataagtgatagagctggaagttgaacccatgcagtctgacgctagcgatcacattctcaacaatgacactctccaaggaaaatgacattaagggggtggtgtgacaagggtcagttgaagacagttgaagtgtcactggacagatagtgaaatgagcagagaagactctgctcattcactgaagggtggtgcccttgtaatgtgtttgcctccccttctggggaaaagcaggggaaagcaccaaaaaaatatggcacagcccaacctgaacttaccggttcgaatgttacttttagcaataatgattgaggaaagtgagtcaagtaacttgccctgggtcaccaccctagcaagctttgaagccaagattcaacctacttcctgtgacctcaagtcctccaactgcaaataaagtgcattgagaagggttttcttcccagtttaagaaccatatgggtgttacgaatgtggaaaattgaggtgagggacctgtggcatgatgtgtgctctttcttaaccatgagcaagcgtctagccgccctttgagattagctgcaggaataggttgccaattccagagcattgtgcaacaatttatctttctccatagctgaatcatcttgccacattgcatggggtacttggatagtgtttccagtttagagccattcagctatttgttactagatcagaaaggacacatgaaacaataccttttcatgtcatccaagaagagtccagaatttagggtatcagttggccagtctatctcctgccctctttccgctgcctatccctgaaggcccagaacaagtctcatttctccttatgttgcccgtcatcatgatctcacctttcagtcaactcctgtagcttctcctgtctataaacatgtgcagttttctcttatcttaaaaaaatttctgggctccgacgtcccctcaagctgttagactaactccttcctttcacaatcacattttttcaaagaggaagctacacttaactgtgttggcttcacttcttaaacccccacaatctggcttcctccccacctcctgttttgttttgttccatagggcaccagtgaatttctaatgacaaaaaggggtctttgaccattccttgtcttctttctgacatctttttctcctctaaactcttacacacaggcatttccaaaaatgacactcttcttcctagctcagaggtcttcaccagagtctggggcaggttttgtgacatgatctgatttacttttttttggaggttcactctggtggctgcaaagataatgggttgtaaggcagcaagaatggaagcaacgcccaggttgatactgcagaaagtctaagtgagagataatagtatccagactagagtggtggcagtacagagtgagagaagtgaatgtatttaaggcatgtcttggacatagaaccaatggaaatttctgatggactggatctgcaggtgaaggaaaggaagaaacacaaataactcccaggtttctgacttaggcaactggatagatgttgatatctttactgagctatgaaagatagaaaaggagtggaaagaacttgggtggggaaattgggagcttggttttgaaaatgttgttggatatgactgttaggcatcccagtggagaaagccacatcccttgcctagctcagccactcttatgacttcagttttctcctctttatatggaaaagtgtgtgtgtgtgtatcactgcaattgtttaacccactaatttctgaaacacttttcaacacttttaaaatcagaatctatgtctattctgccctactgtatgagttcttcctcccgattgccctctttcttatattgctacctctagtcttttctttacccagagtttacatttaagagttttcagcaacccttttccatcttcctccctctcaccaatatccaagtaataaaaaagtcctgttgaacctaccctgtacattatttctcctttgttcccattgcccccaccctagtttaaaatcattatcacttcttatttggaccattgtggcactctaactgcccctagccttttaatgactaatctttcctacacactgctgctatagaaatcttttttccttactatttctgtctaaatatgttttcccatttcccacagaatgtagtctattctctttagcctggtattcaatgttcttcatgatctggcccttttagctaaactcgactagaaattttcccttttgtgttactgtttatgctgttcattctagtcagcatgccctctcctggctcccatcttcaccaagcaaaatcttgcccacctcctaagaccctctcaaatgccatcaaagatgaattctagttaccatttattaaatgccagttatttagtacttaatgcttatttattaagtaggctaagcatcctacattcattgactctgcattgcctttggtttcttgtgtacttgccccatcttctgtataagaatgcaaattctggctgggcgcggtggctcacacttgtaatcccagcactttgggaggccgaggcgggcggatcacgaggtcaggagatagagaccacggtgaaaccccgtctctactaaaaataaaaaaattagctgggcgtggtggcgggcgcctgtagtcccagctacttggacaggctgaggcaggagaatggcatgaacccgggaggcggagcttgcagcgagaggagatcgcgccacggcactccagcctgggcgacagagcaagactcctctgtctcaaaaaaaaaaaaaaaaaaaaaaaagaatgcaaattccttgagagcagagatcacatcataatttacctttgaatcctcagctgtactgtacacttaatatcagataaatgtttgatgaatgaatgactgcagagcttttaactagttactatgggaagacataaattaaagaaacataagatcttacattctagttacagagcacatcaccaaaacacccccaagattttcagaataagtattgaagggatacaaaatggagggtgaacaaagttatatcataacacaaagtcatcctggacgaatcaagtttatataataaagggaatgttcaaaggcttcagtgtcaggctgacctaattttgaattcctacttatctgcttgttaagtatgtgattttgaatgttgtttctctaaactgcatctgtaaaatgggtgtattgcaacctcctttataggactgttgcaaggatgaaatgagataatatggccaatgtgcatgtcacaatcttcaataaatgtttaaagtctaaaaagcaagccagactttaaatatagtaaggatattaggttgtcccagtggtgttagtcagtcagtttaggttgccatgagaattaagatcctgagcactggccagcttgtatcagatcataggggcctccaggaacctccaaatgctgatggtaattctaaaaccgcctcagatagtcttaaactggaccctcacaccaaacctaaaatatttccctaatctatgtttagctgcagaaacaagaggaggtaggaggagaagagctgcagtttccaaacaccactgcttgcaaccttcctaccacatgaatgttcaaggagttacatttgacatcattgcttgatcggaatctaccaagcaatttccactgcaccagccagtctcttgggaaagtactatcagatttgccagagtaaattattgagattgttaactctcatgtggacatggatagttaatgatgaaaagaaatgaactataaaattgcatcacagaatttactgtgtaaacttttcaaaccatttgtgccattaaatagcgcccccaccaaaaaaaaaaaaaaaaaaaaaaaagcctatccttaggataggcagctgatgtagctggatggtgggggctctaggtggccacgttctatctgtgtttatatggttaaatggatgaaatggatgtgtttgcagattgaaacaattcataaagagttgaggctacttttttttttttttttttttggtcttagcgctgaaactaaaaatcgcggttattttagtgtttagccccggctcttccgttgctcaaacctccggaaactacatctcccagcatgctgtgaaactggtctgacttcatctcaaatggccccgtagggcaacaaggatggttagttttgaccctacttatttgtgccataaaaacaatcgatcctaattgacagctatttggacttttacatctgccaaacccttttccttgaactgtggtcactaaatgaggggagtctggtctgggaagtcccatccattccttcaataggatggggagcggtgatagtgtctccggcgatctcaagaataggagggaatgttgaccagggagcaccgctgcggccgatcagaggagcaggaactggaaccctggccgagtccgaaaaaagccagatctggaaggtggctgcggaacggttttaagcggaagatggaggagccggaggaaccggcrgacagtgggcagtcgctggtcccggtttatatctatagtcccgagtatgtcagtatgtgtgactccctggccaagatccccaaacgggtaagggaagtcgggatgaaagaccatgggctttgggggtgggggtgggggcggtggacgaaagagcgttaggaagcggagaggacactgggctgggggaaatcttcagaaatttcgagtagctgtatcagatacctaaagctgtatcagaaggaagtgttctcatatcgtttctgagagcgcagcatgtctcttcgggacgtccaatggacaggtaggagtgggggagggggtacggaggaggggagaggacgcagtttccactcataggggaccgctgaagtcgtgggaaaacaagctgcagggggaaggtgttccatcacctgcctaaggcccggtagctttcaccttagtgattttgatactttgtatctgtattgtctaaagtgtattgtaactgttaacagaagggaagccagttgaaacaaaattaatccgttcctttgttcaggatggtgagattgacggggattttgctgaattaaactttaaagagactatttctgcttttctttttttttttttacgctgatgtttttaggccagtatggtgcattctttgattgaagcatatgcactgcataagcaratgaggtaagttgtctttcttgaacatagccctgaagctaggtgttcgtagccttaatatcctgcttcacagtggggcaaggaaaagaatggtcttttgaaaaaattattttagctttctgtgaaagtattcacagtgtttgtaatctgcctgtaatcccaagaaagctcttgaagaattaagaaaacttggggggccgagagcatggctcacgcctgtaatcccagcactttgggaggcctaggtgggtggatcgcctgaggtcagtaatttgagaccagcctgcccaacatggcaaaaccccgtctctactaaaaatacaaaaaaattagccggacgtggtagcgggcgcctgtaatcccagctactcgggaggctgaggcaggagaatcgcttgaaccccggaggtgaaggttgcagtgagccgagattgcaccattgcactgcagcctgggcaacaagagtgaaactccgtctcaaaaaaaaaaaaaaaaaaaaaaaaaaaagaaagaaagaaagaaaaagaaaagaaaacttgggacaggggagtggaaagtgcaggaagcagttaaggttcattagaaatacagctcgattgcttggttaagtatcccaggggtaggtgcagtgcattgtggagattttgagtacatttgggtattaaaacctgtctcatacaaaaaggtgttcagctaggaggtgttccatttttcttttgatttcgtttcattctaagccagatttgagggtgtgagttcaacctaagacttttagacaacccaccaccagcaccaaactttaatgggtgaggctggagacagatcaagaccaaagaaggccgggcgtggtggctcacgcctgtaatcctagtactttgggaggctgaggcaggcggatcatgagctcaggagatcaagaccatcctggctaacacggtgaaaccccgtctctactaaaaatacaaaaaattagccgggcgtggtggcaggcgcctgtagtcccagctactcgggaggctgaggcaggagaatggtgtgaacccgagaggcggagcttgcagtgagccgagattgcgccactgcaccccagcctgggtgacagagtgagactccgtctcaaaaaacaaacaaacaaaaaagaccaaagaaaactgccaagactgcgccagaactcaagagagagctaactgtttcttccaaaaacatgaacttgctgtttattgccatttctgtatttgatgtcgttataagagcaaatataaccctgccacatataggattacttatgacaatttctggccaaataggtgagtgctcataccaactagtgtgctatgcttcatttatctcccagaaggtagtgtaataataggctttcagattttatccttattattaacaaaatcattttgtaccttttaaagggaatttttaagccttttttttttttttttgatggagtcttgctttgtcgcgcaggctggagtgcagtggcgcgatctcggctcattgcaacctccgcctcccaggttcaagcgattctcctgcctcagcctcccgagtagctgggactacaggcacgtgtcaccacacccattttaagccattttttaacccatatggtttggttaacatagtaactatatgccttccattaaagttatttaacatttcaaaaaattattttatgacaaacaagatatcaaagcaaagcaaaactgtccagtttgcttactgttaaatagggaggttttcagtaagtgttttttaacatttaccaaaataaatggaagggtactagaagagggagcttttaggactgggaaatacggtccgagatattacaaaatttttattttaatgggtagatttttcacctctggtggtatagatttgtcttctttaagaagaagcaagaattcttgggtcttggctatgtatttcacttttgaggccaaaccacaggatttcttccagctaccttggtgatagtagtagcctgtatagtcgtattcattcatcgtaaactcatggctgtgttcccattcagcagacatttaaaaccactgctgcctccctgtggcccaggtcagggctccttcaacttgaatgtgtatatgaatcaccttaaaatgtgtcatcttgtttaaaaatcatcatgttaaaatacaaattctgactcaggtctgaggcaagtctgaagttctgcatttctaacaagcacccagggaatgctgatgctcctggtctatggaccaccctttaagtggcaagggctagagaacagtagtggcagctgtggggtcaagaagaggaaatggggaataggcagctagaggttagatgtggtaaggcctcttattgggttagctccctttattccctcactcgcttctatttgtcatttttcgtgaggagtaggttgagaggttctgagtgaagtccggttccaaccattttgccccttctcgcctcgctctcagaggcagataggagggtccaagtctagaaacattacattttgggttgcccattttttatctgttaatagaatgatagttatccaccaagcatttttgtatgtgttatccttttatcttcacataagtcccataaagttccccattttacaaataagaaaactgaactacagaacagtygacttatctgaggttatagagctagtaagtacagaattaggacaggaacccaattctctgactccaaatctgactccaaattcaaaatgcatgataacatagctgcctattaaaataaagatatagctgaaaggattagatagcccaattcgcaactggttcaaatgaaaatatccctgcctactagtttgtcctgaaagttgtaactcacagggtaaagtctgtctgatacctgattatttgtttaacttgaatataattacttttgtttacttacctataaactcaagggaaaatctatcttcttgccccttattaatagagtcactactgtagatgtgaggcagtgaagaccgcacagtgcagtggaagaacagaatrtgtttattactccagcctattggaaccagaagttgagacgtattttcttctcagactgctggcttctgtttctagcttctggcatacgctgggtctgactcactgacctctctttgttctctctgttattattaggatagttaagcctaaagtggcctccatggaggagatggccaccttccacactgatgcttatctgcagcatctccagaaggtcagccaagagggcgatgatgatcatccggactccatagaatatgggctaggtaaagtcattaccaggcagtgatgggagatggacagactaattttttttataacttgtatgatttttttaatatttttcgttaagaaatcatgtgttaactgtcaatcttaatcttttggtttagccacatataactcactaaacaagcaaaccatatgagttgagcaaaaccacatgaagggttagatgaaagaaaacctttcagttgcttatgccctactggcagtgctcagatctggtctggctgtgtatatgctgatttagctgtcctgtgaccttatattttaactggagtacagatttatgttctggctaagtttttgtacctcacccctcattaaacagctgcattttttaaaactgtaagtgacctgcaggatagtctagaaaaacagcatggtttagcagaggaacattgaactggggggtcaacagagctgggtcccaagcctggctctgtgtgaccactgacaagacacatcacctctcaggcttggtttctctatctgtagcctgtgactagttcatcaggagggtttatcctttctagctctaaccttttaaaatattatatccccaacattggagttgtttctgtctcagttggagctgatattagcacagtggctttttagtaggttaggttgttgtcacacctcaacctattcctcctctttttccagttcaccttttaaccagctcttctgatttttgccctaaggttatgactgcccagccactgaagggatatttgactatgcagcagctataggaggggctacgatcacagctgcccaatgcctgattgacggaatgtgcaaagtagcaattaactggtctggagggtggcatcatgcaaagaagtaagaaaatgacctttctgttttctgactctttccttgagtcagtttctcagttatgtaaactcttatgcttattgtattgacatttacagagagacgtgtgtgtatgtggcactttacaaggcattctgaagaaatccaagtgaaatagaaaaaagattacctaatatagtggaaagcacactgctcaaagtcaggacacctgggctctacacctagtttttctaacttggctaactgacttggactgattaccctccctaggcctcagtttcttcatcaataaaatgaacaaaggatacaactagacagtctctaaattccttttcggctttctagaaattcccctgtcttcgagggacttacagtctagaaacattaacaaaattagaatagagaacaacattagttatggtaccaatggaatatatgtatgagctgaagagacttatcagtagaaagaaattaatcatggaagtcttggcagaagtgaattttagagctagttcttaaaagaagtggcaaacagatttttaaaaaggtggaaaattgacgctaataggtttaaaacaaaaggctgaagaatcaagaagagggctcatgctcctctaatgaaagtagcaacccagaggtagatgtctctcaaagacaaagggcttgtgaaaaggctcttcctaggtgcttcttggagttagaggagaagtcctttggagtgtttgtttgtttatttgtttgtttgtttttgagacagagtctcgccctgtcgttcaggctagagtgcagttgcgcgatctcagcttactgcaacctcctccttcccagttcaagtgattctcctgcctcagcctcctgagtagctggaattacaggcacccgccatcatgcccagctaatttttgtatttttgtagagacagggtttcaccacgttggccaggctggtcttaaactcctgacctcaggtgatctgcctgccttggcctcccaaagtgctgggattacaggggtgagccaccgcgcctggccaccttctagagttttatgttaacatgtcaaactgcagtagtctgtctgagaaggattgctgggccctccttcagcatttgggactttgtttgatatttctgtagtacttaatccacattgaagaagaaggattttttaaactctgaatttatcgatcctctgtctgagagaaatgaagccactgtggtagtaactgccaatgcctcactcaggaatcaattgttcatgcaatcaaccgtgaccttaggtgctcttaggtcaagagaaaacaacactttgtttttcagaataaaacacagcacaacttcagcatatgcaggttaagataataacagaattttttccatcaaattgacagattttgtggccaaggaagtccttgaaaaagtttactgctagaatttactagttgggcaacacagcaaaggaaaccaatgttttagtaatgagtcttacatggttttaaaaacagagacaagctgccttttgttagcttttgcttgcttgcctgcttgcttttttcttgctttgtttgtttgtttgtttgttttttgttttttgttttttaataaagacaatgtctccctatgttgcccaggctgatcttgaactcctgggctcaagggatcctccatcctcagcctcccaaggtgctggcattacaggtatgtgccaccacacctggcctctttctttctttcttgttttgtttttttcgagacagagtctctctctgtcaccaaggctggagtgcagtggtgcaatcatagctcactgcagtctcgaactcctgggttcaagggatctgcccacctcagccttctaggtagctaggactacaggcacgtgccaccatgcttggataatttttgtattttttgtagagatgaggtcttgctatgttgcccaggctggtctcaaattcctggcctcaagtgatcctcccaccttggcctcccaaagtgctggcattacacatgacagccactgcacaccgcctgccttttttttaaattcaaaataaagacaatgactgctaggagaaaaaaaatgaccctctcccctcccaggtgcagagtgaaaggagaaagctaagcttctctgaacgaaagacttctaggtcctcttgggcttggcaagttgagaagaaaagtagtgtggcttcatagaaaaggcttgcttctatgaatgacatccagtttattatgcaattaaattaactgcagaaggcctactagggcctgggtcattttccagtggagtactctgcttcttattactgttttgctgccaaaggaagtacactctgtcttgacccaatcacgactgcttctgggctgcacacagacatggggatacccacatatatcgccttaactgttgtagacatctttcagctgatcctgcatggaaacggacatgcctgtgataaatataaattacagagtctctagagattgccccagtttaggtctgaattccaaggtgttcttggcataactagaacctctctgtagatggactacaggcatttaggccacaaacttacatctagccaacatttacctattataatcacaatatttgcttaaacttcccatctgcaaatatatgtacagattcatacatgccatttattcattgaacaagcattgattaggcacctactacatgtcaaatgtatgtttatcatcaccagtaagcagagatatagaaattgaagcaagatatattgtttcccctaccaagtttgaaaaagattctttatttcaaaatatccaggtggtagaaggattacagtgaaattaatacaaccccttttgaaaaccttggaagtgttaagaatgggaaaaaatgttcataccagttgggccagtaacaatattcttggcaatctattctaaggaaataaaccaattctacctgcaagaaatttatatcttaggagtaagacagcaaataattgcatttgaaagctaaaaaaggatgattttcaaagaatattctacaaaagaagagtaacgaaggactaatactattagatattaagcatccaaaactacagtaatgaaaacactggtacaaaaattagacagataggttatagtacaccccccaccccaacaaagagaccaattatatagaatttaatctattacaaaggatgcattgcaagtgaatgggagttgaaaggtctgttgagtaaatgaatggtattgtgacagcttgtaccattataccctcatctactgtaataaactaaaatgagtgacagctagattgaaaagttaaatatttaaaaaagcaaattttaaacactagagtgaatggatatttatcaagcttctaaaggggaagaattttctaagcttagaaagtaattttttaaaatcacaaaggaaaagatcaaacccgactgtacaaaattttaaaaccaaaataacttttaaaaggttttttggctattttcaaaatctaaacacagactgaaaaagcctatgtatcataaatatgacaaagtgtaataggcttgtattatctaacccactcctacaatataatgtataagaagaaatctgcacaaagaacacgaatagacaatttacaaaggagtttaaggacaactggaaaacattggaaaatgttcatcactactaatcaaagaaatgtaaattaaaaccattaggtaagcctcttttttttgagacagaatctcggctctgtcatccaggctggagtgcaatggtgtgatctcggctcactgcatcctctgcctcccgggttcaagcgattctcctgcctcagcctcttgagtagctgggattacaggcgcgtgccaccatgcccggctaatttttttatttttagtagagacggggtttcaccgtgttggtcaggctggtctcgaactcctgacctcatgatctgcctgcctcggcctcccaaggtgctgggattacaggcatgagccaccactttttaagcctaaatttaacagaattgaaaaagatggtactcagtttcctagtgagtgtggtttggaagaaagcattttggtagccaatgtgtattaatgccctttgatcaggtaatcttacttctgggaatgtggcctaattttttttttaaatatgggaaacaaactattttcatgaaggtatttatcagtgttatttataaaattttaaaaactaaaataacatgaatgcctagcaataaaggaatggtgaatctactccttagaatattatcctattgttttactgtttttcttctgtgcaaaagctttttgtttttatttatttatttattatttacttatgagacagggtcttgctctgtcgcccaggctggagtgcagttgcacggtcttggctcactgcaacctctgctccccaaaggtcaagcaatcctcccacatcagcctcctgagtagctgggactacaggcacataccaccacacctggctttttttgtagagatggggtcttgccatgttgtccaggctggtctctaactcctgggctcaagcaatcagcccactttgccctcccaaagtgctgggattacagttgtgtgccaccatgcccagccttatgctattattttaaataatgattataaggattatagggaacttcagataaatactttatgtgtgtcaataaaaaagcaggtcttggctgggtgcagtggctcatgcctgtaatccaagcactttaggaggccgaggcaggtggatcacctgaggtcaggagttcaagaccagcctggccaacatggtgaaaccttgcctctactaaaaatacaaaaattagccgggtatggtggcgggcacctgtaatcccagctactcgggaggctgaggcaggagaatcgcttgaacccaggaggcagaggttgcggagagccgagatcgtgccactgcacaccagcctgggtgacagagtgagactgtgtctcagaaaaaaaaaaaaaaagaaaaaaaataggtcttaaaaatgtatgcacattgtaatcacagctttgtaaaacatatgaagaaaaaaagactggtgggaatgataacagtggttatcttagaataacaataatatagtggcagaattattttttctcccaaatattattttttattttttaatttaattttctttttacaactttatatatatatttttttatttcaataggcttttggagaacaggtggcgtttggttacatgagtaagttatttagtagtgatttctgagcttttggtgcacccatcacccaagcagtgtacactgtacccattgtgtagtcttttatcccttatcacccctcatcctttcccccgagtccccaaagtctaatgtgttgttcttatgcctttgtgtccttatagctcatcttccacatgaatgagaacatacgacgtttggttttccattcctgagttacttcacttagaataatagtctccaattccatccatgttgctatgaatgccattatctcattcctttttatggctgagtagtattccatggtgtatatataaaacattttctttatccacttgttgattgatgggcatttgggctggttccatatttttgcatttgcaaattgtgctgctataaacatgcgtgtgcaagtatctttttcgtataatgacttctttttttctgggtggatacctagtagtgggattgctaaatcaaatggtagatctacttttagttctttaaggagtctccacactgttttccatagtgattgtactagtttacattcccaccagcagtgtaaaagtgttcccttttcaccacatccataacaacatctattattttttgatttttttattatggccattcttgcaggagtgagatagtatcacattgtggttttgatttgcattttcctgatcgctagtgatgttgagcattttttcatatgtttgttggccatttgtatatcttcttttgagaattgtctattcatgtccttagctcactttttagtgggattatttgcttttttcttgctgatttgtttgagttctttgtaattctggatattggtcctctgtcagatgtatagattgtgaagattttctcccactctgtgggttgttaactctgctgattatttcttttgctgtgcagaagcattttagcttaattatgtttcatctatttatctttatttttgttgtatttgtttttgggtctttggtcatgaattctttgcctaagccaatgtctagaagggtttttccaatgttatcttctagaatttttatagtttcaggtcttagatttaagtctttgatccatctcgagttgattttttgataaggtgagagatggggatccagttacattcttctacatgtggcttgccaattatcccagcaccatttgttgaatagggtgtcctttccccactttatgtttttgtttgctttgtcaaagatgagttggctataagcatttggctttatttccagcttctctattctgttccattggtctatgtgctatttttataccagtatcgtgctgttttggtgactatggccttatagtttgtagttgggtaatgtgatgcctccagatttgttctttttgcttagtcttagttttggcttagcttttggttccatataaattttaggattgtcttttctatttctgtgaagaatgatggtggtattttgatgggaattgcactgaatttgtagattgctttcggcagtatggtcattttcacaatattgattctacccatccatgagcatggaatgtgttttcatttgtgttgtctctgatttctttcagcagtgttttgtagttttccttgtaaaagtctttcatgtccttgattaggtatattcttttttttttatttttattagtaaactacattcaatcatattttaatcatatttttaaaagataatacatcatgaaaaagtagaatttataccaggaatataagtatactgtaacattcaaaaatcaataaatgcaattcaccacataagtgtattaaaaaacaaaccatatggttgtcccaatagacacagaaaaggcatttgaaaaagttcaccttcgggccatgataaatatagtcagcaaactaggaatagaagggaacttcctcaaattgatgagggccatctacaaagaacctatagataacatcattcataatggcgaaatactgaatactttcccactaagattggaaacaaggtaaaggtgtccattgttaccatttctttttttttttttttttttttttttagtatttattgatcattctttggtgtttctcggagagggggatttggcagggtcataggacaatagtggagggaaggtcagcagataaacaagtgaacaagggtctctggttttcctaggcagaggaccctgcggccttccacagtgtttgtgtccctgggtacttgagattagggagtggtgatgactcttaatgagcatgctgccttcaagcatctgtttaacaaagcacatcttgcaacgcccttaatccatttaaccctgagtggacacagcacatgtttcagagagcacggggttgggggtaaggttatagattaacagcatcccaaggcagaagaatttttcttagtacagaacaaaatggagtctcctacgtctacttccctctacacggacacagcaacaatctgatttctctatcttttccccacatttcccccttttctagtcgacaaaaccgccatcgtcatcatggcccgttctcaatgagctgttgggtacacctcccagacggggtggtggccaggcagaggggctcctcacttcccagacggggcggccgggcagaggcgccccccacctcccagacggggcagcggccgggcgggggctgccctccacctccctcctggacggggcggctggcggggtgggggctgccctccacctccctcccggacggggtggctgccaggcggagacgctcctcacttcccagacggggcagctgctgggcggaggggctcctcacttcacagacgggcggctgctgggcggaggggctcttcacttctcagacggggcggccgggcagagatgctcctcacctcccagatggggtcccggctgggcagaggcgctcctcacatcccagacggggtggcggggcagaggtgctccccacatctcagacgatgggcggccgggcagagacgctcctcacttcctagatgggatggcggccgggaagaggcactcctcacttcccagactgggcggcggggcagaggggctcctcacatcccagacgatgggcggccaggcagagacgctcctcacttcccagacggggtggcggccgggcagaggctgcaatctcggcactttgggaggccaaggcaggcggctgggaggtggaggttgtagcgagcagagatcacgccactgcactccagcctgggcaacattgagcactgagtgagtgagactccatctgcaatcccggcacctcgggaggccgaggctggcagatcactcgcggttaggagctggagaccagcctggccaacacagcgaaaccccgtctccaccaaaaaagtacgaaaaccagtcaggcgtggcagcacgcctgcaatcccaggcactcggcaggctgaggcaggagaatcaggcagggaggttgcagtgagccgagatggtggcagtacagtccagcttcggctcggcatcagagggagaccgtggagagagagggagagggagagggagaccgtggggagggggagggggggagggggagggggagggggagaagctaggtatattcttaagtattttattttttctgcagctattgtgaaaggggttgagttcttgatttgattatcagctttgttgctgtggtgcatagcacagctattgatttatgtatattaattttgtatcctaaaactttgctgaattcatttaccagttctaggagctatttggatgagtcttcagggttttctaggtatatgatcatatcatcaacaaagagcaacagtttgacttcctctttaccgatttgggtgccctttatttctttctcttgtctgattgctctgactaggacttccagtactatgttgaatagaagtggtgaaagtgggcatccttttcttcttccagttcttggggggaatgctttcaacttttgcccgttcagtataatgttggccgtgggtttgttgtagattattaccttttattaccttaaggtacgtccctcctatgccaattttgctcggggttttaatcataaagcgatgctgaattttgtcaaatgctttttctgcatctattgagatgatcatgcgatttttgtttttaattctgtttatgtggtatatcacacttattgacttgtgtatgttaaactatccctgcatctctaatatcgaacccagttgatcatggtgaattatcttttgatatcctgttggatttggttcactattatcttgttgaagatttttgcatcttcatcagggactttggtctgtagttttctttttttgttatgtccttccctagttttggtattagggtgatattggcttcatagaatgatttagggaggattccctcttcctctaacttttggaatagtgtcaataagattggtatcaattcttctttgaatgtctgatagagttcaactgtgaattcgtctggtcctgtgcacttttttgttggcattttttgttgttgttgttaccatttcaatctcgctgcttgttactggtctgttcagagatgctttatgttcctggtttaatgtaggagggttgtatatttccaggaatttatccatctcctttargttttctagtttgtgcacgtaagtgttcttagtagcattgaataatctttggtatttctgtggtatcagttgtaatatctcccatttcatttctacttgagcttatttggatcttctctcttctttccttggttcatcttgccaattgtctatcaattttatttattttaaaagaaccagcgttttgcttcatttatcttttgtatttttttgtttgtttgtttcagtttcatttagttctgctctgatcttggttatttcttttcttctgctgggtttgggcttggattgttcttgtttctccagtttcatgaggtgtgcccttagattgtctatttgtgctctttcagactttttaatgtaggtattcaatgcatttgctaaggggcatttccccttagcactgcttttgctgtatcctagaggttttgataggttgtgtcactattatcgttctgttcaaagaattttttaacttttgtcttgatttcattgttgacccaatgttcattcagaagcaggttatttaattgccatgtatttgcatggttttgagggtgccttttggagtttatttctaattttattccactgtgatctgagagagtacttgatataattttgatttttaaaatcaaggcttgttaaagattttcttaagtgagacttgttttgtggcctatcatatggtctgtcttggagaatgttccatgtgctgatgaatagaatgtatattctgcagttgttgggtagaatgtttttttgtttgtttgtttgaggtggagtctccctctgtcgcccaggctggagtgcagtggcacagtctcagctcactgcaagctccgcctcccgggttcacgccattctccttcctcagcctccctacaggctcccaccaccatgccgggctaattttttgtatttttagtagagacggggttttaccatgttagccaggatggtctggatctcctgacctcatgatccacccgtctcggcctcccaaagcgctgggattacaggcgtgagccaccgcgcccagcctgggtagaatgttctataaatctctgttaagtccatttgttcgagagtatagtttaagtccattgtttctttgttgacttcctgtctggataacctgtctagtgctgtcagtggagtattacagtccctcactataattgtgttgctgtctatctcatttcttaggtctaatagtaattgttttataaagttgggagctccagtgttaggtgcatatatatttagaattgtgatattttcctgttggactagtccttttatcattatataatgtccctctttgtcttttctaactgctgttgctttaaagtttgttttgtctgatataagaatagctactcctgcttgcttttggtgtccatttgcatggaatatctttttctgcccctttaccttcagtttatgtaagtccttatgtgttaggtgagtctcctgaagatagcagaaactcggttggtgaattcttatccattctgccattctgtatcttttaagtggagcatttaggctacgttcaatgttagtattgagattgaggtactattctattcatcatgctagttgttgcctgaatatcttggtttttataaattgtattgttgttatataggtcctgtgagatttatgctttaaggagcttctatttcagtttattttgaggatttgtttcaagatttatgcttatttttagcaattcttgtagtgctggctttgtagtggcaaattctctcagcattttttttgcctggaaaagaccatatctttccttcatttatgaagcttagtttccagtggatacaaaattcttggttgataattgttttgtttaaggaggctaaaaataggaccccaatcccttccagcttgtaaggtttctgctgagaaatctgttaatctgataggttttcctttataggttacctcatgcttttgcctcacagctcttaagattctttccgtcgtcttgactttaggtaactgatgactatgtgcctaggtgatgatcattttgcaatgaatttcccaggtattctttgagcttcttgtatttggatgtcgagctctctagcaaggctggggaagttttccttaattatcccttcaaatatgttttccaaacttttagatttatcttcttcgttggaaacacaaattattcttaggtttggacatttaacatagtcccaaacttcttggaggctttgttcatttgttaaaattcttttctctttgtgtttgacagattgggttaattcaaaagccttgtctttgagctctgaagttctttcttctgtttgttcaattatattgctgagactttccagtgcattttgcatttctctaagtgtgtccttaatttccagaagttgtgattgttttttatttatgctctccatttcaccgaataattttcctttcatatcctttatcatgtttttgatttctttaagttggacttcacctttctctggtggctccttgattagcttaataatcgaccttctgaattctttttctggcaattcagggatttttgtcttggtttggatccattgctggtgagctggtatgatcttttggggatgttaaataacctcgttttgtcatattaccagaattctgtttctggttccttctcatttgggtagactgtatctgagggaagatctgggattcaagcgctgctgttcagactcttttgtcccacggggtgctcctttgatgtgttgttctcctccttcccctaggaatggggctccctaagagctaaactgtagcgattgtttttgctcttctgagtctagccacccagcagagctacccagctctggcctggtactggggagtgtctgtaaagagtgctgtgatgtgatctgtcttcaggtcttgcagttgctccagtggaggtagcaggggagtgaagtggagggtccttagttgtgtttttcttaagtgcaccggttttgtgttggttggcctccagccaggaggtggcgccttcaagaacgcatcagctgtggtcctatagggaggatgcaaacttgccctggggacacctgtttaagtattcaggtttctcaggcagcgggcagggccatagaactcccaagagattatgacctttgtctttgtctattggggcaggtagagaaagaccaccaggtggaggcaggggtaggtgtgtgtctgagctcagagtctccttgggtggggcctgctgtgggggacgggggtgtggttcccagtccagtagagttacattcccagggggattatggctgcctctgctgagtcatacaggtctccaggaaagtgagggaaagccggcagtcacaggcttcaccccgctcccatgcagcctgcagtcctagaggccggtctcactcccactgtgcctcgctccccgcgctccccgccctccccgccctccccgctccccccgccctacccgctccaaacagcactgagtctatttccaggcagccagtgaccagggctgagaacttgccccagaccatgagcctccctgttgagaaagcaagccaacttacagttgtttggcatctcagggagcctgcagcagtgatccagttccttcaaagggtctgtggattttcttggcttccctggtatgttcctggggtagttttaggagcaaaagttcatgatgtgagtctccacatgctgctctgtccatccgagcaggagctgtaagctagtcctgcctcctagccaccatattagtaggcagaattattgatgattttttaaacatatttttctctagttttcaaaatttctgtaatgatatgatattattttgtagctaaaattttaccaagataaaaagagaatccccaaaattacagcaaatgtaacaaagggttaaaatctctaactgttctaattgatttttttaaacactaatactcagataaatgaacaaaaaacacaaatagacaattcacaaaagaggaaacattaaacaagcatgaaaaaatatttagtatcactaataaatagaggaattgaaatattagcagttagcccttgaacaacacaggtttgaactgtggggattaatttatatgcagatttttttctataaatacagtcagccctccgtatcagcaggttctgcatctgcaaccaaatacagatacaaaatacagtatttaccgaatgcaaaacccacatatacagagggctgacttttatcatctgcgggttccatggggccaactgtgggatttgagtgtgcatggattttggtatctgcaggggtcctggaaccaatcacccacagatatcaagggattgtatatatatttttccctcctaccaatatgagccaaacaaaggaagatctttgataacatctattactcttggtaatctattctaaggaagtaaaccgacccaaaatatggtaaagatgtgtttgtgaagatggtactttctctgttacttatagtagccaaaaaaggggcaggagggagacccaaatattcaacaacagtgggttaggtagtatactgcaacatatccacttgaagggatattataaaaccattaaaaatggtggctattggccaggcgcggtggctcacacctgtaatcccagcactttgggagaccgaggcaggcggatcacaaggtcaagagatcgagactgtcctggccaacatggtgaaaccccgtctctactaaaaatacaaaacattagctgggcatggtggcatgagcctgtaatcccagctacccaggaagttgaggcaggagaatcacttgaacctgggaggaggaggctgcagtgagcctagatcatgccactgcactccagcctgggcgacagagggagatgccatctcaaaataaataaataaataaatagggtggctagtacaactgcataaatagaaaaaatgcttatcttataatgttgattttgtttttaaagggcagttggctaaacctcatatattcacttagagtcctgtaaagaatatatgcatatgaaaatatcttagagggaaataaaacacaatgttaacagtggctttgtgaggatggtgatattgggtatgtgatacacatatatatatatgtatatatacgtatatatacacatacatatatatatttttttttttttctaagacaagagtttcactctgtcacctaggctggagtgcagttgtgcaatcatggtttactgcagccgcagccttctgggctcaagtgatcctctcacctcagccaagtagctgggaccacagccacacaccaccacacctagctaaatttttttttttttttgaaacggagtttcattcttgttgcccaggctggagtgtaatggtgcaatctcagctcactgcaacctccacttcctgggttcaagtgattctcctgccgcctcagcctcccgagtggctgggactacaggcacatgccaccacgcctggctaatttttttacttttagtagagatggggttttgccatgttggccaggctggtctcgaactcctgacctcaggtgacctacctgcctcggcctcccaaggtgctgggattacaggcgtgagccactgtgcccgggccacctggctaaatttaaattttttttttttgtagagatggggtctccttatgttgcctaggctggtctcgaactcctggcctcaggtgatcctcccacctcagcttcccagagtgctaggattataggcgtgagccacagcatccagccctatatttttatatgtacacacttatataatatactcacatcttttctgtttcctatattttctctaacgtgattgtattacttttataaataaaactttttataataaaaactgctggaaacaaggcaggaagtagttataatgcagtgtggtcagagtgttaacattatatacaaggtagtgtggtgtccagaagaaggaataggaatttgctttcccattggtggggatagaaaattccaagcagaggaaataatgaaattctggcaccaagaaaatacagaacatttgtagaaccacaagtagtgaaatgtggccagagtctgagggcaaataggacaaggtcagattataaaggttttataagctatgctgaggaattggacttttttctgtgcttgatgggaatttactaaagaattttagggagggctgaaaatgtactggttggattggagggaactgagactggaggcaggggaggctttcacaatcaatcaattaacgaacatctattaaactccttctgtatgcctggcactgaggaaacaaagagttatacaggaggttcttattacttgaaggcagttggtactgcacaaaaggccattagtgaatttatttaaaagggggaccaaaattttagagtaatagtggaaggggtagggtttgattaggatgctagcttgaataactaaaagctattaaaatatacatattttgtctcatttaataaaattgagtgctagatataacaatgcactaattcttaaaacaaaaaatatataaaagattcatggcttttgttttgtgcctaatttttcaaacaaaattgcatgatatttcaagatggtgtgtttcacttcctgtgagatatttgtagcatgatctttaagagggctgattttgccaaaatattcaaggacttcattagtgttcccaaaggcttttctttaatcacttggtattcaaatcattctgttttgaaccacttttaaaatcattattcatatttatttttctcctcttcaattgtggactgttctaccagatcctcatcagttttgtgtgtgtgtgtgtgtgtgtgtgtgtgtgtgtgcgctgacttcaagatttccagcatctttttataagatttgtaattttactttctgacagatttgcattgaattgctaactgatatacctgacgatccatgagagacaaaatgactgaacagatggatggggttagattctggtatttaaaggagtgggttctttgagctgggactgctataagtggtcagttcattagcaaacacttgagggcagttggtactgcacaaaaggccattagtgaatttatttaaaagggggaccagaattttagagtaatagtggaaggggtagggttacgacagcttttgtatccttagaaaacctcaaagcctgggtactgctggggctaagataataaattctcagtaataagatctgcctatttcagcaaaggtctagtgcagtgtttttcaaaccagggactgcaacttgttgatggacattatatcaatttagtgggctacaatgagctttctttcatatcaaggtgggtttcgtgaaacttgttctggggtgtgtgtgtgtgtgtgtgcatgtatgtatgtgtttgtgtgtgtgtttgtatgtactaggtcacagtgtgaaatgtcaagccactgtagagtagaatgactgtgaacattaaagtaagacctggatgtaaattcaggctccaccacttactagttatgtgtgtaacctcaggattattccaggaacagcatgtgcagatgcttagaggtgtgaaagttggtggggtgggggggacttccaagtttgtcattaaagctggaaccataggttcctatagataaatggccagagataagtttggagaggtataaagagtccttgaatgccaagctaaacagcttggacttgatcctttaagtcagtggttcttaaccttctttggttgtggaccccactgaattttccacgaccaaaaaaggtttagaaccactgacctaaagaatgcatatacatcccctagaaaatctacatacacaaatttctccttgtagtttcagaaagtataaggatttcctgaagcccatgtatgggtcctagattaagaacttcagctttagacagtgagaagtcactgaaagaatttttagccaggaagaagtaacgttgtcagacatgcattttaggaatatgactctagcaatagttggccgttaaaccagagggacagtgactgtccatagagaaatctgtgaggacattattttgataatatttccaagaagagatgaaagcagcggtgatgagcatagaggagagaataaattcaagagccatttagtagatacaatagatagtaaagaagaccaattagatataaatgataaggaaggggtggtctagatttcttgtatagatgattaaattatgttgccattaactaagaagcctatggggtgaagattcatgtgcttatggaacatctaattgaagatgtctattagagagctgataatagggcccagaccaggacttctctacatttgatgtgtatatgaaacctctgggattcttgtttaaatgcggattctaattcagtaggtctgagatggaacctaggaatctgcatttctaacaagctcccaggtaatatatgctgccagtctgtggaacatacttgaaacagcaagagactggagctcaggagaatcaccttcactgaagatagagatttgaaagtcaacagcattatagattgtattaaaactaaggaaatcaataaaatcaccttggaagcatatatagaataataaggcggggggggaacaaacaaatactgagacttatgggactccagtgtttaaaacggggtggaaaaagaaaagcctccaaaggaatcctgaaaaggaatggtcaaaaagaaagagaatcagaaaagacatcatagaaaccaagggtgaacctcaggaagaccagtttgaatagcaatgtctgatactgtagcgcatgcatctgcaacagaagtgatattggccccaagggaacaaaaatttattcttggtagaaggaggtgaaaaaaacttatattttatgatggtttacagtcctccaatgtaccacagtacataaacagatgtacagtatatctgcagtattaaaatgttatgggggggtcaattaggaaaaggtatctaaaaaggctctttcagtagaggtgggacatgataatgaaaaaatgtttgacagcctgggcaacatagtgagactccatctctacaaagaattagaaaattagctgggcatggtggtgcatgcctgtagtcctagctactcaggaggctgaggtgggaggatcacttgagcccaggagtttgaggttgcaccactgcactccagcctgggtgacagagcaagatctggtctcagagagagagagagagagagagaagagaaatggttgagaaacagtgctatagagatgacgtaagatttatcagtaaggaggtgatgatgaagatgtcttcaaaggatgaaaagggatgtgccagtgagacaaggaggtggcagggtaggggtattccagaaggccagaacaacatttttaaaagtagggcaatataaaataaaaaggcagaaataaaataatgtaaaataaaaagcagagcaatgtaatatagtttggcagatttgagaaactacacatagctcaatattgctggagggttaaggtataaagtagataatggcagaagaagaggtagaaacacaggaaatgggtcatgaagcacttcatgtatattggaatcaccgaattttaaaatgtagatttctgggtctctctcagacatcttgatttggtaggtttggggtagtacataggaacctgcactttcaaactctaggaataattctgttatatgaattttaagaaactctgctataggaaatggggagccactgaaaaattgtgttaggaagtaacacggttagatgtttgtaggaaaataactctgattgcagttatagcagatggattgcaagaggcataggctgaacgtagggagaccgcttaaggtatcacagtcccactgaaaaatgaagacctgaacttaggcaaagcaatgagattaggggacggggaatggtgaaggctgatttgagacagctttaagagataaaagcaagtattgatgattaactagatgtgggaggagatgaaagatgaggaagataactcaggtttctggcttgcctaagtggagtcccaagcaaaatgggaataacaatagctaacctatgttgagctatatagtaggcgctaccttatgtgcatttttctcatctatcctcagaggaacactaagcagtaggtacaaattattatctctgttttatacatggaagtacagagaggttaaatgacttgctgaagtttagtaagtgaccaagttgggttcaaacccaggcaatctgattcttcaagctggctacttaaccactgtgctacacttactacactacctcaataaataggaataggtggtggtgtgcatcagaggtaatatatagggaaatttgatatccagatttggaaatggaagtagaagctggaactggagatagatgtgttgccagtatatcaagtggtggtgaaaaccatgaaaatggatgggattacttagggaaaaggtagataataaggagaaaatgaaagtagagcctagaaccccaagaggcaccaacttgtaatgggcaagcagaagaggctccagttgattcagctgaaaagcaacaatcaagtctagccatataatcaaaatagaaaggggttatggaatcccaagggggcagaagagcttaaggaagaaaagagttctcaacagtttaatgtaccacaaagaggtaatctagataggtactgaagtgtgaatcgtatttgacaattaagatggtcattaatgaccttggtcagagaactttgtagaaagtgatggaagtatacctcaaaccattgaggagtgagtaggaactaacgaaataggaaaggaaagctactgtgtctgtccagaggtttgaatgataaagaaaagaggaggggtgtggtcaagggaaagtaagggttgaggggtggtttgttggtattgttttaagagattaggaacatttagattaagaacatttaggagctgaaggggaaatattggaaatatgaaaaagataagagatggagcaaagtcttagaggtggcaggagagagtgaggtgaatgtcttttagagaagcatctcttgtgaagccagagcgaaagaagtcaagaatgagtgtggtaaaggagtgtgggggttgcctgctagcacactgatgaagtgcctgtccagtggcctctgcttctctatgttgtcctcttgccttgtgtcacttgttcacagacctctttgaatcctttgattctgccttctgtcatcagtgtcttaggaagtcatcttgttccatgtaaattcccttacatggaactaaccctatccatgacattattcatttcacccagcacggtgactcctaacctccagaatgtgtctagatcacatcttgcttggttactttgactggctagtcttcacccttccaccagccttttctagtgtcttattctgtttggttctgcatctcagttcccaatatcttccttcatcttactgataatccatttaagacccacatctctaacatgaccacatccttcttcccccaacaattctgtaatttaccctcttgtcccataacatttcagccttctgtccagcaacataggatctatgccagttaggtcccctctgtcctgcttccctgctaagagagggagaaattactctcccatggaatgctattggtttctgggacttccacctgggggcagtaaatggtagagccataaagctctatgctgtttgtcttggcaagctctacaggaagaatgtagaactagacctccagctcttagttaccacccacccagcagttagaatcaaagctactagagctgtataccaagagcttcaccctttttgcctcagagagagtaaatggtagtgaattacactacagttccagttccccaaagggctctgtgcacagtgtaacttgttaaccaagtagccaaacctcctcctctatccacaccaccccagctccagcctttataaacaaataaataactgcatgaaaatggagatctggattcagtatcagcaacattgcctcaacaccaagggaaacccctccttacctgtggggggcatgtctctgtacttgctattcacaactgttctgtgctggcacctgtagaacaggcacatcactagacaaaaccaacaggcctttaccatagtagcccagatcattctctgtcaatacatgtccaacccataaggcactagccccttcatcagaaaactgcctggccagccaccagcataggaacgagctaggacatgctttgtccctatggcatccctaccactagcctctagtgggtgaggggtgttcctaaaattcctatagaaatggggaagatggtatgtcacaggtgaagtgtggcacagggaatcccagctccatcaattactacctctctgtgcctcagtgtcctcatttataaaatggagataacaatagtatgtaccttatagggttataaggattaaatgtgataattgcagttaaagagcttagcaagagcctggctcatagcaagcatttgataaaagtcatttattatatccagactaggttatactcaggagttcttaggcaacctctcagacaggttcctggtccagcaagtctaactgcctgtgcagctgaggtcagccttgatattgtttgtcacccactaccctttgtccatatgccattccttgctgagaatagactattctctactgccttcaagactcacatccttcactttgtcagaattttgctaccagcatttccaatgaccttctaccccacccaaaacaacacagagaattccctgttcaacccacccctcacactgctaggatccaactcatacctataaggcaaataaagatactatctaccaagagacagagcgaccgcccctaattgatgaggatgactatgtggtagccctgataaccaggacttgccttactaccaaaggagcagattctctctgagtctaaaatcaaggccttctacaaaacaaaaactttggacagcatcttgattcctcctccacctcttccatattagccttgagactctttctgaaaataaaaaggagggagttcttccttgtcataattatcccatccttagtgtaatcactatccaaaattagtctggaaccttctaaatcaattccatagttcttgggcaatattttgagaaattcgcttaatgtgacttgacagaatctctgggctggatggtattagagcgattacagtagtaccaacttcaggccaagccccaaagtgtaaaaatcgtgtttctgggctacattctgttatgccagagtttatatagtgctgggtaacatgtaagcctttttgaaatgaagtctcctaggaagattgaaaacatcagcaatcccttgataccaccagcaatccatctaccacctgtacattttcactaccccaatattcgatctccttaagagaaaggaatttggttccctgtcacacaaaaaaatgaccttccagtagcttaaagtcttgcttatttctaccccagccctggcctatactgttgactaatgccttcaacatccaggtgtggggagtgggatattgtcctgtcgcaggagaacctgggtactttgatctctgcccctgtccccacttctccaagaagttggtcctaaccaaggtcaattactccaagtgcaaatgagagctcttagcgatcaaggccacttttaagacaggacatacttcctttcagagagacaggcagcttgtggtcatgagctcaaaccattacagcctggaccagccagggcatactcgcacccatcctgtttcagaattcagaatcttaaggggaagtggaaatggttccagcttgagaatgtcacagccatttaccccagtcacagcataggtaacaggcagatgcacgtgtagaacgtaaagatcctggttcatcatggcgcagcccagaagtttctgttccatgtgccccattctaataggatctgcagtcacttgtgcccattagcaccactccaagaagcccacacaggtattcaaatatgcttgtaatctgatggagcgtgtttcataatgtagtctgcagaccacctgcatcttaatcctaaaatgatgattccggaatcagaccctttaggggtggagcccaagaatattcatttttaaccaatgcctacccaggtgattctgatacacagcacattttgataactcttcatctaagtggtctttcagttgtctcctgtctgacctaacctgtagtatgcctttatgatttctacagttgaagtagaaagaccaaggtatccttcaggctctcgggacattgggacattgtcccaatgaactctattgtagattcacatctagaacaccttcaaatcagtgattgatccctcttaccctcttggcccaattcacaccagctactggtgccttgttcatctaaaaggtcttccctttcacaagtcccacggccacctgctctccagccacagccatatgcattaaccacgtactggcggagaatgctactgctactctaacacataacacattggttctcctccccagactcctcagaatgcatttcttaactcactatacccctccatccaggcctcttcccttcaaggcatcaatcgtttctagcccactattgccctggctagttactgaaaccatcaacactccagagtctgccaatacctgggtcaaccaaaaccaagtatggactacacaaggacatagccagttagccttcagcatacaacatagcacaggggttaaaagcaggaactctgaagtcacactgcctgggtttgaatcccagcactatcactttctatgtcaacttgaacaacttaaaccctcttttcctcaagttcctgactataaaagggagatgataatactacctacctcaaaaaacagtgtgatatgatatgaactaatatgtgtaaagcacgtagaatagtgcctggcacatactgagcaccaaaaagtgtttgctcttaaattgtatatgaattacactaactgaatcattcaggtgtgagacatcagtgagatttcatttgggcacagactcatctgcccatgccaaaaattgaaggactctttataaacctttgaagtgaaattcagtcatctgcccatagacctcctacagcagcagctccttgaacttcacgcccttcctccgcatgatcactcatccagtcttttcagtactccttggtgtactttgactaccttgtctctgcaattagccccagcaaacctaaggctaagagaccagttatgtcatgaaagaggtgccagatttccagcagcatcatggttggtccaccgcctcattctctgggaaagttgttgaccaagacgtagttgggtggaccactcaaagggaccttgatataatctgattataggtatgctttctcagctcaacctcagcaatctctcttaaatgttattctgagctgggtggtaatggagtgattacagtagcaccaactccaggctaagcctcaaagtgtgaaaatgatgtatattcactttcagttcaaggtaccaggactgggagtaaattacttgcctccaccctcacttcctgaccccagatcagctggatcactctacccattctcactgataaaggaaaaagatcagactgttatgctcagtgaccaaagtagagattgggaaagtatgaacaaaattaatgacagcagatgtgaaaagaaaggatagcacttgagagtaatttgggaagtataattgacagaatggacatggtgatcaattggctgttgggggtgaagagaagggatatgtcaaaaatacccagtttcttgttaagtagatggaaatattataactaagactggaaataacataccaaaaagtacatagaagtatcaaaggatttgtgacagagagaaatctgagtgggtaaaatgtataggcaggagaaggtggtagagagtagattggttggtgggtgtctgattgacatcctaaacttaatatgtccaaagctgaacttgcaatctttccctcccatatggcaatcttattcttctagttgtttaagtcaaacatatcagaattgcccttgactcctttcgttcacacctcaaattcaatctgtaaaaaaaccctgtcaactctgtcttcaaaatacatccagaatctgaccacctctcactacctctagcactataactctagtacaaaccatgatcacctctctcactgattattgcaacagcctcccagctagcgttcctgcttctagccttgccccctttggtctgttctccacacaacattaaaattacccttttaaaacaaattagatcctgtcactcccctgctcaaaacactgcactggctccctgttccactcagagtaaaagccgaagtccctaccatggcctacaaggccctgcacaatatccccttttctcctctccctggtaaaactgctattctctgctttccctcactgttcttcaggcactggattcattgtgccccttggacataccaggcatgttcccacctctagggctttgcccttgctattcccactgcctggaatgcttttcccccaaggatgtcccttcacttccttcaagtctttgctcaaataacactttctcactgaggccttccctaaccacatttttaaaaaatttgcgcacgagaaaaaaaaaaaaaagcctcctgtcatccttttcctgttttactgttctccataccattgataattggaaaaattacctaatctacttgttaattatatctattttgtttcaccctcccgccaccactagagcataagcttcatggggaagggaagttttgtctgttttgttccttactatagcttcactgcctagaactctacctggcacatagtaagccctcatacaaggccccagctcgtattgttggggaatggacaagcgtgaaagttgcagtagatgggcaggacagagatgaataggaaatgttaattcccaaccctttaagagactgtccatcatagtgttaccagttgacttactgaatgttaaaatgtttgggaaataaagttattaaattggaatgattagttaatgccttctcaagatagattctcaataaatatttgttgaatgaatcagtggtaatatcttgacagatatcaaattatcaggaccgggagagagagaaggtgagaggttccacgtggcagtcagagattacagtgctcacaaagtcaagcagtcaggatgtcagagattccagcatattgaacattactagactgtgggctgttatataagcttcacattttaacaaaaaaaaaaaccactagagggagtgcaaggttaaatcaagtatgttctccgcttaatgaaattctattaacgtcattctcgtttctatttattgatctatgttcatctaaactgtttcatcaggtcagagcattctgcaccattttctttcaccagtccagtatctgactcataataggtcttcaataaatgtttataatttgaataaaagaatgaaataatgaatatttagaatcaacagacttttcatcttgaaatttgttttgctaattaacagtggttagtatttccattaagaaaccattcttcagagttcataacctggctgataaagataacactcatgatccttagtcttaaagaatctttaggcaagaggaggaaaagagtcagacttggagtttgtgtgccttatttgtataaatgatagtgtcagacaagagtgtatgttgtaaagccagagctaggagtcactaaagccccagtcaggcctctgctcccatatcagctctttccttctcaggaggggtgggcagctgctgaaggatgcggttcctctgggcttgtttgaccccacgggaatcattagctctgcttttgtacatggggatttcactgcttgagaaacctgctgtccacaatgtgcttgagagctgtagggttgttcaggagaaagaaagttaaacagactttgcttattgtcttaatcatccattgttctcactgaaattctctgaagggattttgggtgtctggatttgcagctttctgacctgggttattgttgggggtgcggagctcttgtctagttatcatctgatggctgaagcctccaactgccctggatccaggcccatgagctgggccctcatattaggaatttttcattaatggaatcatttcaaatggtctgacaaaataaccctttttaaaattttgattaacattttttaagaatggttttagatttatagaaaaattgagcagataggccaggcacggtggctcatgcctgtaatcccagtactttgggaggccgaggcgggtggatcacgaggtcaagagatcgagaccatcctggccaacatggtgaaaccctgtctctactaaaaatacaaaaaaaaaaaaaaattagctgggcatggtggcgcatgcctgtagtcccagctactcgggagactgaggcaggagaatcacttgaacccgggaggcggaggttgcagtgagcggagatcgtgccactgcactccagcctggtgacagagtgagattccgtctcaaaataaatacataaataaataaataaataaataaaattgcacagatagtgtagagtttccataaaccccacacagtttcctctattgttaacatcttacatgagtatgaaacattgttacaattaaccaatattgatacatgatcactcattacagtccatagtttattcagagtttatagttccttagtgtttacataatgtcctttttctgtccccagatcccactaggacaccacattgcatttagttgtctccttaggctcctcttggctgtgtcaatttctcagactttctttaattttgatgaccttcacagttttgagaaatactggtcataatactcagtactacatttttcagtgtgttttatgtattttaatgtatttttccatctatttaatggaatcttttcaaaagcctgagaaacacaacccatttttattgctcttctcaacacctatttttatgatatgtctgaaccgttcctgaagctagtccttgctagaggagggcaagtgtctctagcattggtgaattttctaatacagtatagactccagagtaagcctttctatttgttttctgttgtcaccaaacccatcctgatatcttttctcaggcaactttaaatggaaattgaaggtgcaaactcaaagtttgtatctaaaactaattgatcttttgccttcttttttcttctgatgtcttaactgtagtaagagtcctaatttttcagtgtcagtgtttaaatataagaaccaagggaccgagagcagtagctcacacctgtaatcctggcactttgggaggccgaggtgggtggatcacctgaggtcaggagttcgagaccagcctggccaacatggcaaaaccccgtctctactaaaaattaaaaaattaaccaggtgtggtggtgcgcacctgtaatcccagctactcgggaggttgatgcacaagaatcgcttgaacccaggaggtggaggttgcagtgagccgagatggtgccactgcactccagcttgggtgacagagcaagacttcatctccaaaaaaaaaaaaaaagaaaaacaaaaccaagggctaagagaaaggaagtaagttgcatagagccacattattccacagctttacctcaatatgattttctaccccaacttgtctttaatataactgtattatcaccaagataaaactcatctttttttcagcatatttgcaaatatttaatccaactacccactcagattcttatacaactgatactactaaatttagttggaatgctagtaagctgcattcacttcctcactggtctttgctagaattcagtggatttttcttctgataatcattagtttcaatgcctttcatgtactgtctttggaatttagtaaaaatggctctttaaactcttctggaaactaaggacaaaggtaaggcataaggggcagaggtaaggcataaattgagaggagcttaaaccactagtcttgcctgatgtactttaatataacagtaataataaagcatataaagtggatcaagtcaactggtaactatggactttattccagacaactaacaaattttctttaagagattatgacagcctcctctgggaggcatcttgaaggtcactaagctcttgttaatgccttgaccaggaatccctatctgtggatttactataagagggatatatatccataaagaaggtacaacaattaacttcagatttctgcttgccattcaaggcttaataataaataatagcagtatttactaaaaatttctcaaatgcatactaattgcaggaaatgtataaatagttggaactcaagccattcacatgagataacattaattattgggtgtaatagtacaaaatatgaaacttttagaactgttcaggtaaataaaggatctttccacctcattagatggcaactttggaataggctcaacattggatacaggtcactgagactgaatgatttatctgtgccatatacttgaatacatttttgtttctgattaaaggttggtcttctttcaggtaatatctgtagttagttagctcagaaagttagagtatagtgctaatgaggccaaaactatgattttagtccttgtacaaaccagttagttttcatttactctaatgctactactggctgcaccatttcccttggccagccagctcttcaaaagcatattctaagtcataagggaggccaatctgggaggcgtaggttgataaatctatcccagttttgaagaaacagcccaaaccttctttctctctgtgctgggtcaattrcatcattgtcactggtttggctcactatgctgttatgagtaccctaaaatgcagaactatgtccactgcctcctctgttttatatcctattagctcaggaaagattttcattccattgagcaccagactgtggggtatatttttggaagcaagtgtaggtgtaccagagccaaaaaaggttgggaacaactgtagacaaactgatctcactgttcctagagctgccaactctaggcacagagcccttaaagtggactataaatgtcaagtgggtagttaaaagaaaacccattatgtggaactaatttctgatttcccacaattaggtgcatgtattttgtgtgcatgtatattttatgtggagagaagcagatgtgcacgaagcttatttatttagctatatgtattaaatcacaattgggggcttaatgagagaaaaaatgtgagtttcataattacaatagttaaaactttggatttttaataaatatctttaaacttatcatgataacattcctctgaaggagacaggtaagattagggagtttttggtaagatgaaaaactgaagcagagacctaggtctcctggtttctaccccggtttctatcatgtaagtgtccaagaggacttgcttgatataactatgaagtcaaataacagaaagatttctgttttttccagtctccttctttgatagaggaaataatgcagttataaacacaccagcttgatctgtaaaagccattgagtcagttctcacaagagagctctgcatttgacagctacatgaactgggccacagaagtagtgaatggggtgttacgaaaaggagcccacagaagatatcataacaaggtttggacattaggcatggaaacatctgattatataatctgttaaccagccataagctataatgacataggctaggacttgtaagctcatgtttccttccctagatcattatacccagcagtgaggaaaagaaagctaatgtgttctaatagggatgtcagcactatcttaaagatcaagtacgggtgtgctccaactgaaagaaatctcaggaaataaaagatgtgccgttaccaaatttatagatacagggattttggatagagtattcactttatagaagggctcttccctatgaccggatttacctgagttccttaaattaagttctccagtgaattcaagatttgatttacaaagaattatcacatgacttttcaggaatatattcctgaatcaaattttaccatagtattactatttataaaatgtaggtattttatgatagtattactatttatacaatataggtatttcacaatacacagtctatgcactaacataaagcaaagagcagatttcacagaactttgttttcctgtttttttttgtagcaccatatgagatgtgtagatttacatgtaaggtaaagcataaaaaccagattatgagtactgtctagagagaaggagagacacaagggcactaaaagactatgagaattcaatgggcaagagatacaaaaagagaaagaacactgaaaattttagccatttccaatttctgggaaagccatcatgatttctatctctggtatgcctctcacctcagaccaatcagttgaattttcctcccctgctgatctcctgtaaccatttctgcccttaaacatagaaattacttataatggtacaaatagcatcatttaatgaagcgacagtagaagcaccaataccacattcccagaacagcttaagaggtttgatcagctagtactgaaaataaggaaaacaacgtaccttgtttgaaagtaagaatgaaacttgctaagcccaaccctggatcataaaagctacaggcttgggtaggggtgctcttaaatgccaaagttacagctagaaaaatgacccttgtcctgacctgccaacaaccatggaaatttacagaagctccaacaactgcagctctgtagaaatggtggacagaattataaaaagatatttcagagcttctagctaattgcagttaaacacccaaaatgtatgaagtgaataaatttctaaagggcatcttcccacatcagaaaaagcatcagctgttttctccatctttccatgtaataatcagcatatatcaagtactggaactaccatccataattctactatgacgggccccttgaaaaggtacatttcaagaatcataacttctttccatttatttagatcatctttaatttctctcaacaatataattttcagtatacaagtcttgcacttcttttgctaaatttattgctaggggccggatgcaatggcttatgcctgtaatcccagcactttgggaggcccaagcagtaggatcacttgcggtcaggarttcaagaccagcctggccaacatggcaaaaccccatctctactaattgtacaaaaattagccgggcatggtgatgcgcgcctatagtcccagctattcgggaggctgaggcacaagaatcgcttgaacccaggagttggaggttgcagtgagccaaggtcacactactgtactccagcctaggcaacagaatgagactttctcaaaaaaaaaaaaatatatatatatatacacatatatatatagctacgtattttattcttttgatgctattataagtaggattttctttcatttttggattgttaattgctactatatagaaataaaattgatttttgtattttgatttcatatcatgcaatcttgctgaactataactattagaagtgatagtttttttagtagactccttaggattttatacatacaagattatctcatctgccaacagacatagttttacttcttcctttgtattttggatgcctttcttttctttctttttttttcttcttgccaaattgccctggctagagcctccaatataatgttgaatagaagtggtgaaagtgggcatccttttctgttcctgatcttatggggaaagcatctagtctttcaccaggcagtatgatattagctgtgaatgtttgtaggtaccctttatctggatgaggaagttccctattcctagtgagtgtttatatcgtgaaaaggtgttggatcttgtcaaatggtttttctgagtctgttgaaatgctgatgaggtttaatcctttatcctagtaatatggtatattatattgattttttgatgttaaaccaaacctgcattcttgggataaatccttttttggtcatggtatataattattttaatatatttgctggatttggtttgttagtattttgttgaggattttgtatctatattcataaggaaaagacgttagtctgtagttttcttatgatgtttttgtctgattttggtatcggggtaataatactgacctcctaaaattagttgggaagtattctgtctgtttctagttctaggagacaatgtagataactggtattatttctactttaaatgtttggtagaattcaccagtgaagccatctgggcctgggctttcttgcagaaattgatatgatgattctaaaattcatatggaaatgcaagggacccagaatagccaaaacaatcctgaaaaagaataaagttggaggactcacaattcccaatttcaaaacttaccataaagctacagtaatcaaaatagtctgttactggcataaggatagatacatagatcaatgggatagaactgagaattgacaaataaaccccacacatccatggtcaatttttggcaagagaaccaagaccactcaatgggaaaagaatagcctcttcaacaaatggtgctgggataacctgataaccaccttcaaaagagtgaagttggacccctacttcactccatatttaaaagttaagtcaaaatagatcaaagacttaaatgtaagaactaaaactataaaactctttgaagacaatttagaagtaaatctttgtgacctgggttaggcttcttagatataataccaaaagcacaagtaacaaaaaaatagattgaatttcatcaaagttaaaaacttgtgtgctgcaaatgatttatcttcaagtaagtagaaagataatccatagaatgggagaaaatatttgaaaataatatatctaagaagggtcttttatccagaatatatgtgtatagaactcttgcaacttaacaataaaaagagcaatgactcaattgaaaaatgtataaaggattcaaatagatgtttctcaaaaaaagatatacaagtagtcaataagagcattaaagatgttcagcatcattagtcatcagggaaatgatgagctaaggaggaggatcgcttgagcccaggagtttgaggttacagcgtgctatgataaagccactacacttcagcctggatgacagagcaagatcctgtctctaatttaaaaaaaaaaaaaaaaaaagacactagcaagtattcaagaggatttggagaaattggaaccttcatacattgctggtgagaatctaaaatggtacagctggccagatgcaatggcttacgcctgtaatcccaacactttgggaggacaaggtgggaggattgcttgagaccaggagtttgagaccagcctgagcaacatagcaggaacctgtttctacaaaaaaaaaaaaaaaaaaaaaaaaatgcccaacacggtggtgcatgcctatagtcctggctattccagaggctgtggtgagaagatagcttgagcccaggagttcaaggccatagcagtaagctatgattttgccagtgcatgctagcctgggcaacagagtgagatcttgtctcaaaataaaataaaataaaacaaaaaacataaaatggtacagccactttagaaaacagctatgtagttcctccaaagttaaaaatatgacccagaacttctactcctagggatgggagtgtatccaaaagaactgaaaatatatgtccatacagaagttttttatgccattgttaactgccacattattcactatagccgaaaggtggaaacaaccaaaatgtgcatcaattgatgaatttaaaaagcaaaatgtggtatatccatacagtgggacattgtttcataataaaaagaaatgaaatactgatacatgctacaacatggatgaatcttgaaacattatgctaagttaaagaagctagtcacaaaagaccataaattgtatattccatttgtatgaaatatccagaataggtacatctatagagacagaatgtaaattagtggtttgccagagccttggggggttcaggagaaatggggagtagttattgttaatgcatgcagggtttctttttgaggtgatgaaaatattctaaaattggttgtgatggataaacaaaaaagttgttttctttttaaagaagaagaattaaaactagtaggtcttacagtagactcattatgcatattagtgaccagaaaataaaacttttctgaataatcacctttctatttttctgttcagtggaagaaattgataaggaaactggggaaatggatagagaaactgagaagttggctcaagtatccctccaaatttaacacttttcagaaaacatattctgatcagtttttcttctttagatagtatagattttatatagtaattccacagttaaaacatcctctttgaagtgcaaattttctattgggggtgcttttcacatgaaatagaaatcagatccattggctacccttcacatacaaaatataagtccagacaatccaagtatggctttaaaagtctggccttaatctacccttctagcctcatcaccaatcattccttgctctggctaattcttcagttcacaattcccctgagccttcccatgcttttcctctgtctagaatgccctacacacctcttctcctcctggaaaactgctactccttcaaggcacggcttaattgtcaccttcacggtgttcttcctgactcccatagacagaattaattgctctagcctctgttttaataggatttgtttttgcctctagcatatcatgttatgttataatgtgttagtttttcggtcttctgccattggaggcagaaaccaagtgtttttatacttctgtatccactgaatgtactaagtataagcctggcccatggtaagataccaattaatggctgattgattagagggtatgtatgtaggtaggtaggtaggtagatagacagacagacagacagacagaatcagttaactacttgtggtctggaaaaggaagcataagataacattctcctgctcagcgttctcaaggcttgattatcagcaataaatatttcctgaacccctctgagaatgtatagtatcattgaaaatccaaatatatacataatggtttctgccctttaggatcttaagagattaaggagatacgactgagatatatgctgtaaccaaaaaaaaaaaaaaaaacgcataaaatagcatatgagtattcagcaatttaagacagattataattgctatcagaattcagtgagaaggaagctatatcttatttctatatctcaggtttggggctgcatggtacagcatttcaggcaactgagggctctagaagtaccctcccaagtagatttccaaagtggtaatagaaggctgataactctcagccctatggtaggcagacagtaaactgcactattgatttccaaggtgacctagtcaaggggaaagtaagctgtggctccttggagcattttcaaggcttttaggctattttccactgggtagatatattagtccgttctcacactattataaagaactaactgagactgggtaatttatgaagaaaagacatttaattgactcacagttctagaggctgtagaggaggcatggctgggaggcctcagaaaacttacagtcttggcagagggacaaaggagaagaaagcacatgttaccatggaggcagaaaagagagaagggaaaagtgcaacatactttcaaacaaccagatctcataagaactcactatcatgggaacagcaagggggaaatccacccccatgatccaatcacctcccaccaggtcccccctacaacactgggggacacaattcaacatgagattttcatgggaccacagagccaaaccatatcagtagggaatccctgtatctttacctgttttatggaatgtaaaaaaaatctacttattcacaaatgtgtattgagtactgtattagtttcttattgctgctgtaacaaacttctacaaatttagtagcttaaaacaacaggaacttattatcttacagttctggaagccaggtgtctgaaatgagtcttacagggctaaaatcaaggtatgggcagggctacattttttctggaggctctagggaaaaatctgtttacttgccttttccttgggtcaagagctatattcattgctcatagccccttcctccaacttcaaagctagcaacatagcttcttttctctctcttatgcttccatcacatagcttccttctcttccatgtcaaatctccctctgcttccttcacaaagacacttgtgattacatttagggcccacccccataatgcaagctaatcgctctcatctcaagacccttaacttaatcatatctgcaaagccatttttgccatataatgtaacattcataggttccagggattaagacatgggtatctttagggtccactattcagcctttcacaggtatttactacatagcaggcactgtgctaggcactttttatctgtgctacatttattgtgtccatagcttttccctcctgctatactgtaaactcctggaagacagagtccttgttgctttcttgctcccaatgcctagtatgtggccttgcttgaggtatataatagataccaggtaaataattaaagaatgacatgagctacaccttgtcacatagtagaatttaaattaacttcattcaaccaatgtttattgaggcaaagagaacgggtttggatatctagatagatacaattcagcaaacagttgttgagctcctgctatgtgccagatatcttactagttattaaagataaggacatgagtaaggtagttccaccccctgaggaaaagtagtgggtaaccaggtgtgcccagactggataagaatggcctggttggtggagaagcaatgtcccagcttcaggcacctctgaggagagcaggttaataaggatgcttcctccagaaggaagcctgaatgtcatataccgtcaccaccatcatgacccccagccattaccccacgttccctaccctatctgctgctgagatgccctctactacattactgccaagcattcttcagcttctgattgctcacctcttatcacaggaagctcacttttccctggggaagcccatttgatactcaggccgttttaaaagttaacaaaattcattgagctaaaacaatgccactgctcttcctacctcttctgcctcctgcagccacacagattaatctaatttttcagtctcatgacagccattcaggtatttatagagactcccttgagtcatatcttctcattcatccatttgttcattcaacaaatgctttctgagcatctcttgtagggctggcactgtgctagggggttgagatagagatgagtagacaaaattctgtcctcaaggagctcctagtctagcaaacagacagcagtacaggtgttctaggagaaacagaaggagatacaaaatgctgtagaaacagggtagagaccaaccagctgtacctagggctaagaggacagaaaggtgggccaggcatggtggctcatgcctgtaaaccaagcactttgggaggccgaggtgggtggatcacctgaggtcaggagttcaagaccagcctgcccaacatggtgaaaccttgtgtctacttaaaaaacaaaaattagccgggcatggtggtgcacacctgtaatcccagctacttgggaggctgaggcaggagaatcacttgaacccaggaggcggaggttgcagtgagccgagatcatgccattgcactccagcctgggtgacaagagcaaaactccatctcaaaaaaaaaaaaaaaaaaaagaggtcagaaaggtggtacttcagcttggtatcattcgttcattcagtatgtgtttagtacatgctgtatgtcaggaactctgctagatgctagagatacaatagtgacctaggatattaccagacagagtatgccaggcaaatagatcagcatttgcaaagtcaagaaggtgtttattcatgtatttaaatacttgtttcggtcattgggtttttactgtgttcccataaatgatgctaggcactggagataaaatagaccacaatgacactgtccctggcttcaagaagttcatggtcaactgagactgacaaactagcattctaccgtaatgtaattcatggttgtaattgccacagagtactaggaaagcatatcaacaaagacactaaactcaactgggctgtggggaagtgccgagttcagaccaggcctttctgaagtattgaggctgttgtggtacttgagctgagtcataaggggccaggaagcattagcctggcagatgcagaagaaaaagataaggaaaagggaactgaacatgcaaaggtaggaaggcatgagagaacaagacttgtgttgagagctgtcaagaattcagcatgactgaggcagaaagtttgggtcagtggcaagagatgaggctggaaatttagaagagggctgaatccttaaggaccttgtgtaacatactaaagtgtttggactttatcctaaaggcagtgggaagctagaaaagatcattaagcagggaagtgacacaatcagatttttctttgacaaaaataaccctggcagcagtgtggaggatgaaatccagggggtgagactagaggcaggaagactggtacagtcagccaggggcgcgataatgaagccaatggcagaggaaataagaaggaggggccaaagggaggttttatgaagtagaattatccaagagaggaagacagaataaacaaaattgactctaaggttgccagtctgagaaatgatgttaagaatacaggaggaagagtgggtttcagggcgtgataatgatgtcatcattggtcatggtgtcttcgaggtacctgagaggtagaaagatgcctggtaagcatttgatcataagagtggagtgcagcagagtggtctgggcataaatgagaatggcatgtgcaagtaacaatccttaattcaacaaatatttattgagggcctagtatgtgctatacactggaggaagttctcaaggtcctggagttacaaaggtgaattagacagtttccacccactgagagcacaccctaaaaggaaaaccaagatacagaaacaaaccacgataaggcagtgtagaaatgcggcgagagaggtgtgcacagtatattattaagggagcatggacaagacacatctaacctaggggagaagaaggatggcttcccaggtgatgtgctgtcttagctgaatcttaaagaagaaataggagttaatcaagtaaaaaaaaaagagagggtagagcattccaggcaaaagggacagcaaaagcaaagttggggcaggagcagggagaaaaaacagtgtaggcatttcagtattgctagagcacaaaatacaagaaatgaaactaaagtacctaagggctgggtcacaggaagccttaaataccatgttcaggtagtttggactataaataatagggagctagtgaagagttttttaaagaggcaaggtctcactatgttgcccaggctggtctcaaactcctgggctcaaacgattcttttgccacagcctcttaagtagttaggattataggcacaagccaccacacatggctagtgaaggttttaaagagagtgacatggtcagagctgcatgcaaatgggtcacttgatggctgtgattccccctcctagaacataagctccatgaggaccgggattttttttttttttttttttttttttttttttgagacagagtctcgctctgttgcccaggctggagtgcagtggcgcgatctcggctcactgcaagctccgcctcccgggttcacgccattctcctgcctcagcctcctgagtagctgggactacgggcgcccgccacaacgcccggctaatttttttgtatttttagtagtgacggggtttcaccgttttagccaggatggtctcgatctgctgacctcgtgatccacccgccttggcctcccaagaggacagggatttttgtctcagtgcctagaacagagagcatttagtaaatactcattagatatttgttgaaggaaggaattaatgtaggagaccaatttgaggggccaagacaagaggcaagaaggttgtgacgctaatcctgggtacaaatgatgaaggtctggcctgtgattggcagtgggaggtgcagagaaggcactggagtcgtgagctgtgtaccaagctttcgtctgggtagatggtgatacctgcgatgattttatcctccttccaatctatcatactgacggtctgctctgttctcgatactgctagacaccaggcatgcaaagagaattaagatacgtggcctgcttttaaaaagctcttaatctcatggggtagacagaccaacctatgaaaagatagatataggtataatgcaggaggtgagtggcgggcaagacagcattactgcttgagctctgccttctgtcagatcagtggtggcactagtatcatagaagagtcaagtgtattgtgaactgcgcatgccagggatctaggttttatgctccttatgagaatctaatgcctgatgaaactacccccaaccatgcccatggaaaaattgtcttccacgaaaccagcccttgaggccaaaaaggttgggggctggtggtataatgtatcatgtattagtgttatgagagagttcagaactagtaagggcaccatgtagggaatagctacatgggggaggagtagggaaaggcttcatggtagtgacatttgaactggttgtcagacatgggaaaaggggttgccaggcagagcagggagagcgtggcattctgggatgatgaatcttgtgcatggacgtggaattgtgaagggacttgatcagattccaggactagtgagaagcgggtgtagtagtagctaacaatcacgggtatcaccatctacgcagacaaaagttagacacacaagcctccagtatctccatagactgttgattctacctcctaaaaagttcttgactccaaccctttctctgcacctcccactgccaatctcaggccaggccttcatagtttcataaagcctgtgttaagattctgaggcctcatctgggcttaatgggaaagagcgctgtgatcaattagcaatgtctgccatgggtataagagtgaagaatggcagcatgcatgccacatccctgggcatccctagggcatagggtatgaggtagagaatggcagcagctggtaccttagaatccagttttgagtgtgataagactgaagtacttctaggctagggatgtccggttgataagtaaataaagagctcagaagataggtcagtgatgaagatatagatttttggagttatcagtatacagatcagaagtagacaaactatttctgtaatggtccagctagtattttagacttcacaggccatagagtttctgtcatatctattcagctttgctgtggcagtgttaaagcagccatagacaatattggaatgaatgggtatagctgtgttccaataaaacttcatttacagaaacacatgacaggctgggtttggcctgtgggctagtttgcctacccctgatgtgtatggtatacagaatatagtcctacctggtgtcagacaagacctgagtttgagtcccaactcttacatactaactttgtgaccttggataagtcagttcaacattcctgactccattttctcatctgtaaaatggagattggtgatagaacctaccttacaagattactgtgaggaataactaagcttttccatataagcactagttatagtccctagcacatagtaaattctcaataaaggtttgataatcgttaatatcactattactattgggattgttcatgttgttatagattttaattaagatcagaagagtggatgggatcactgaggaaaagtgggtagagctgaagagaagagagcatcaacatttagggggcaaacagaggattggaaaccagagaaggaaactgagaaggaactggcaacattgtaggaagggaaccataaagaagtagtgtataggaatcagaggaaagaaagtgttttaagaaacgggtgagaggcaaaggtcttctacactagaaaaatgggcaaaggacatgaaaaggcagttatcaaaagacatacaaatggataataaatataagatgttcagtttcactaacagtcaaagacgtgaaaacaaaatcatgtgtttttagtgtttgcctatgagattagcaaaaatttaaaagattgacacaatgttaccatggctgtgggaaaacaggtactgttttatatttattggtgggaatgtaaatgtttttgtactttccagaggacagtttagcaatatgtatcaaaatgaaaaataagccgattctgtgagacagcaattttacttctgggaatttaccccaaagagatagaaaattatacaaacgtattttttaaatacacataatgacattggtcctagcattatgatagcaaaagcaacataaaatattcaacaatagaagaattatcatggcagacagacacaatggaatattgtacagccatttaaaatgatgacagagctctacacttattgacgtggaaagtgtccatgacaaattgtaaaaaggttataaaacagcagggtagcattgtctccattaagtaaaactttgcttcctagcaaatagtgttttttgtttgtttgttttctggatagtgagatttcagatcattacattttttgtcaaaggttgaatattttttactgagcacatattacttgataaaaacagtaacaagtactgtgttggtaaaccagctctctgaaaaaataaagcctcaatttatagcagttgtcaattttagtaatataaatactccccaaggcttgcaaaatttttaatatgcagcaatcggctcttaccagctggctctggcataccactggcaatgactctgtttaaaactcaataatgtggtgtatgtttaccagtgtcaaatgctaatcaagtaagatgaagattaaaaattacctatcactgatgtgcctggtaaaaggcatttcagtggaacagacagttgcagaataaatgggaaataaggaagtggagaaagcaaggcattttgtagtcaacagaaggaaagacatgggcaattgcttgagggagatgtagagtcaaggcaagtttaatttgaaggagtggaaagaaataccaaacagagataatgttacaaactttttcatttcttacttttgaataatctttagagttcaaagtatgcatgcacgtgaaagttcttgaaacaacccttccttcgtgttggtgttattatcattaccactgtatatatggagaacctgaggttcagagaggtttagtggcttaccccaggtgtcagagagtgagccacatttgtgtgtgcctgttgggtttcacccactgggtaagccctgaaaatagggagacggataaaatgtggccactagcacaaatgcctcaatccttctcgaacctgagtctccctcttctataattttaagttctttttctgcttgttctgggaaggccgtggcaagccatgaacctgggtatggattatttgtctctgattggatgagaagagaagctagcccagcatgagagcgcaagtggttattagcaacaatgaagttgagtatgttgaggaccgagaatgggtctgttggatttggcaatcaaagattactgccatatttacagtggtgtaaaaagaacaggctgaggagcaaatgaacaataaggaaataaaggcaggggagagagagacagagacagatagagagaaaagaagaattatagtaaatatgggtaattttaaaagcacttgtttttagtgctcaaattatcccaaatttggcctttgagctggctcctatgtgtttgtgacatgaccccatcagtttttcagcacctttaatttctggtgaacaaggtttccctggttttctgaactatccctgctccagccctggaatcagccgtttctctcagaaatcctggttccttttagtagggaatggcatttcagtaccaaaatctaggtactgggtatgctcattgccactggcatgcattgcttgccttttctgtagaccaacctaagaaatatataatttttaaagaaattatgaaaagattgaaggaaatggattatagcatagtctatagtgctactccaaagacagcgagagagagggggaaaaagggagaaagacctactttagagcagaacagcagctaataaatgtagaaggtagactaaaaaaaaaatcactgttttgcagccccccagtacaataattgattttggcaaagatcatcagatggatgctaaaacctttgagcagaaaggtccttgagaacaggatattcacacagtttcaaattatcaccccacagattccttgctaattacaaagaggaaaatgcacatttacaataggaaaatctggcagtcaccaggttaaacaagttattaaactcagcattgtcagtagcaggacaagctgacatcgtgctttctgatgtgatctcagatgaagtacaaagcatcatttatgaaatattcttgccagaaatgtttatgaagaaacaattagatgaacctagagtgtgggatatccaacaagtgaactagcctggactcttcagaaagccattatcatgaaaaacaaaagaaggtggaggaattgttctggattttagaaaacaatgaactcaaatacaatgtgtcaaccttgaatggattctgaattggagagaaatcttaaacaattattaaagacatttttggaatgatttgggaaatttacagactatattagatgatattcttgaattgatgttgattttcttaggcatgataatgtagaagtctttttcttaggagatgcatgatgaagtgtttaggagtgaaatgtcatcatatttgtagcttactttcaaatggctcagcaaaaagtgtgtgtgagagagagacagaaatgtggaaaattatgacaattggtgaatctaggcaaaaaggtatatgattgcttgtcatactattctttcaactcttccataagtttgaaatttttcaaaataaaaagttggaaaaaacagttcttttaaagcctatgaaatgtatgatgagtttcagcaaatgatgctgggacaattggatatgcagatgcaaaatgatgaaattagaccattacctcaataccataaacaaaaattaactcaaaatggaaaagagacctaaatgtaagaggtaaaactaaaaaaacttttagaaaaacaaacataggagatttttgagacgctggttaggcaaagatttaatacatataacaacaaaagcatggtccataaaacaaacatttgataaattgaacttcatcaaaatttaaaacttgcccttcaaaagacaatctttgaaaattaaaagacaagctacagactaggaaaaaatgtttgcaaatttcatatatgataaaagtcttgtatccagaatatactgttacaattgaataatagacagacaacccaatttaaaaatgggcaaaatattttaataaatactttgtcaaagaaaatatatgggccaggtgcagctgctcactgaagcctggcctgtatattccggcactttgggaggctgaggcagatggattacttgagctcaggagttcaagaccagcttgggcaacgtggtgaaaccccatctctacaaaaaatacaaaacttagctgggtgtggtggcacattcctgtagtcccagctacttgaggggctaaggcaggaggatcacttgagcccgggaggttgaggctgcagtaagccatgttcgtgccactacactacagcctgggtgacaaagtgagaccctatctcaaaaaaagaaaatttataaatggcctaataggcaaatgagaagatgctcagtatcattaatcagtaggaaatcacaaatgaaaactaccatgagataccattactcatccactagaatagctgtaatcaaaaagatagacaataagtgttggcaaggatgttgagaaataggaaccctcatacattgctggtgggaatgtagaatggtacggctactttggaaaacaatctgacagtttcttaagaagttaaacataaatttatcatatatcccagcagttccactcctaggtatctacccagtgaaaacatacctctgcacaaagacttgcacataaatgttcatagcagctctattcattatagccaaaaagtggaacaacccaaatgaccatcaactagtggatgtataaacaaaatgtgagatatccatacaaggaatactattcgggaattaaaaaggaatgcaacatgaatgaacctcaaaaacattatgctcagcaaacgtgctcctaggttatttacacaattgacttgaaaatgtatgtccacatgaaaacgtatacacaaatgtttatagcagctttattcataattgtcaaaatctggaagcaagcaaaatgtccatcagtagatgaatggataactaagctgtgttacattcatacaatgcactattattcagcaatttttaaaatgagctattaagccctgaaagacatggaggaaacttaaatgtatattgttgagtgaaagaagccaatctgtatgattccaactatttgatattctggaaaaggcaaaactatagagacagtaaaagaaattaatggttgtcaagggcttggtggggagaggaagggaagagaggagggatgaatagctaaagcacaggggatttctagagcagcgaaactattctatatgattctgtaatggtagatacatggcatcatgtatttgtccaaagtcatagaactatataacactaagagtgaaccctcttataaactatggactttaatgaataattatgggtcaatattgaaacaaacatatcacgctaatacaaaatgttaataatagggaaagctgtgtgcagggaagaagatatatgggaattctgctctatctgctcaatttttctgtaaatctgaaactgttccccagaactatactaatttaaaaaaatgatgctaagtgaaagaagacagatagaaaaagaccacatcacatattatataattccatttatatgaaatgtctagaaagacaaatctacagagacagaaagaagatgaggggttgcctgggtctagggatgacagcagggattaactataaatgggcatgagggatcttattggaatggtgaaaatattctaatacgagattatgatgatgaattgcacaactcagtaaattcactaaaaatcattgaattgtatacttaatatgagtgaactttatggtatctaaattatacctaaatcaagctgttaaaaattcatttgatctcacattttaaaattattttacattagttccttataactatgaatcatgtaaaaaatgtataatgagatctcatgttcatggatcagaaaacttaatattgttaagatggcaatactcccgaattgacctaaagattcaacacaatctctatcaaaattccagctggcttgttgtagaaattgacaggctgatcctaaaattcatatggaaatgcaagagaccccaaaacaactaaaataatcttgaaaaagaacaaatttgaaggactcacactgtaatcaagaccatgtggtcctggcatatggatagacacgcagaccagtggaatagaattgggagtccagaaataaaccctcacatttatgatcaactgactttcaacaaaagtactaagacaattcataagggaagaacagtcttttccacaaatggtactaggatctacatgcaaaagaatgaatttcaatccctacctcaagccatacataaaaatgaattccaaatggatcataggccaaaatgtaagagctaaaactgtgaaagtcttacaagaaagcataggagtaagtcttcatgaccttgggtgaggcaaagctttctcagatatgtcacagaaagtacaaaaaaaaagaaaatatagataaattgaccatcaaaactaaaagcttttgggcttcaaagaaagtgagaaaaacatcaagaaagtgaaaatacaaccaatagaatgggaaaaagcatttgcaaattatatttctgatcagagatgtgtccagaatatataaataattcttacaactcaatgatgaaaagacaaataacctaattcaaatataggcagaagatttgaatagatgtttatccaaaaaaaaatataaatggccaataagcacttgaaaagatgctcaacatcattagtcattagaaaaatgcaaattaaaaccacaatgagatgccacttcactaagatggctagaatcaaaaggtcagataataacaaatgtacatgaaggcatggagaaattagaatcctcatacattgctggtgggactgtagaatggtgtagccactttggaaagcagtttggcagttcctcaaaagcaaaccatataactgcaaatgcacgccattatccattagaagcttctgaggaacaacaagaaagccagtgtgcctggagcaaagtgagtaatttggacagtggcacaagaggacagagaagttgccataggccacatcatacaaggccttatggaccatggggctttggattttattctaaatgcgacggaattttaagcaaggagtctttgttcttagtaagtttataatgtccactgtaatgaatgagaaaaagacaattagaagaagtgctgaacatccttgaaggcccacctgtgatgggaaccataagtgtttaatgtgtgtctgcagttatagttttgtgggtttttttccaaaagcacttggctgtcctagctttgaaagcagagaaaatggcagaaaggggtcagatgctaagaggaaactaaacatgctaaactcgtaagtactcaggcaggttcttacagagaaagatggaattttcagaagcccttaagaaagggaatgctgtatttctactttttgccatcttttactgctttgctgtaaacaattagatgcaattaacttagtgaaaaaaaaaaacaagaatcagaagatttaaatatgagcctcagctttcccggtgactgtgacactacaggtaaattgccaaagttgacaaccttaagaaagctaaagaagctctttctggctacttgttaagtcacaccaagaaattagctttataccattaaactaaactcattaacctttcttggcaacaattctgtctcgcaaatttcctgtcttactgttaataaatttctcctgatgcagtttagcccattctgcctggtactaatgatagactaaaagatagtttacatcagatctcatcccttctctgctcagaaccctccaatggcttctcatctcactgaaagtaaaatccaaactccttgcagtggcctacaagcccctgtgatgtcccatcagacagcttcttgtacccctgtccttcattacctgtgtttcagccatactggctgcctttcagcttctcagaccagggaagttttttcctgcctcagaccttttgcagtgctagtccctctgcacttttaaaaagtgatagaccagtgaacttttcattaagtatgtccaaaaagtcctgaagacttctccatctcagtatggatgagtttcttttcaccttttgggtctctatttaaatgctacctcctcagagaagctttcactggactgacctatctaagccctacacaccccactgctctatcacattcctgtgtgttatctttgcaacattgcttgtcacaatagggctgttttcttatttggttgtttgcttacctatttatcatctgttccacatacttcccccccaccccccccccacacacactgaaagatccttgagaatgaggtattatctgtcctgttcatcattattcccagagtgtagaacagagtactcaatacaaatttgcatgttgagggaggaaggaagggaaggggcttcttgttatccatgccctgctgttaagtaagcccagttttcctcaagattatttcttaaatgtagtatatattcacaatggaatattattcagccttgaaaaagaaggaagtcctaccatttgtgacaagatgaataaacctggagggcattaggctaaatgagctaaatcagtaccacgtgatttcacttatatgtgaaatctaaaaaggtcagactcaaaaacagagaaaagaatggcggttaccaggggtagagaagggggaaatggggagatgttggtcaggggatacagtttcaggtacacaagatgaatacgttctggaaagctaatgtacaacaatgtggctataataataactttattgtatacttgaaatctgccaagagagtagatcttaagtcttctcatcacaaaaagtggtaactatctgcagtgatggatatgttaattagcttgattgtggtggttatttcacagtgtatatgtatttcaaatcatcatattgtataccctgaatatatatcatttttaattatccaatatacctcaatttttttaaaaaaagattatttctcaagccctcaagttatttggattgacctctcctagcctcttctgtaagtggaataaaattctaatttttggactggtcctgagtatcaaagagaggcttatcatattacagactttcggaggccgaaacaatagaagtcatctgttctaacctctctgtccatatagaaacctttgccataagcacctatctcagaaatttcttagaggtgcctcaacagtaactataggaagtaaaggggtggctaaatacatagggttctggacctccaaatgcccactctctactcactttaccagcccctactttaaccagagcaaagctgattttgtttgttttatgtattgggattccacataaaattttatttgagaaaaacttctgctgcttaagaaaagtttgaaaactactaatctaacctgtgcctgaacatgcacagtgaccaggaatttactcttaatattccttcatgctgtttttatatctcttatatctctgtcttcaactttcaaagatgaccctactgacaacaatcaccatttatacatgtgcctgtcactataaagacaaatgtaccaccaagtggttatttctacatttaaagcctgtccaccggtttcaggcagcatccgtaagttaaagaaactatttcatagattcatcttgatgctagatggtctgtgcagcctatattgctatcctgcagtactcagaaccacttcaaatatgaccttacatcatatcttccaccctcctgatctgtttcacatcagtgaattaccttctgagtttcagtattaaatttcacgctggtgatagccacccactttgccaactgattcaagtcatttccattttaagtgtgtttaccaaacaatactaccacatctaactttatttttggacctatttaatgaaaagtttctcatctatcacttaaaagaaaatggttaatggtgtgactcttgacccaggatcagcctctacataaatccatgctttgtttctctttttgtttatgactggggacagttgaacaatgggtcacaggcccttaaagcttcctgattttggtactgaccagtacatttttaaaataatctgttccagtgtttctctagtttattacattttaatttgtaaatgtataatctggaggttatttttctcttttattcaagataaataatacaaatattcttcttcattctctaggcattttacaattcctataaaatctttaaaattaaaaaaaaacttggccaggcgcagtggctcatgtctgtaatcccagcattttgggaggctaaggcaggcagatcacctgaaatcaggagtttgagaccagcctggccaacatggcagaaccctggctctgctaaaaatacaaaaaaattagttaggtgtggtggtacacgcctgtggttccagctactcaggtggctgaggcagaagaatcacttgaacccaggaggcagaggttgcagtgagctgagatcatgccactgcactccagcctggatgacagagagagactcagtctcaaaaaaaaaaaaaaagtaattagaaaaagtttaaagcatagcatgtgctaagcactgtgctaggtaccaaaggtgaataatatacagtctttgctctccaagagtatgtagtctagtggagaagacaagtacaagaagtaatcattgcaaactagtttgagaagtactatggtagaggtttgaataaactgctggagcacaaaaagagggatcaactttctttgcctgggaaaggaagctggaacttcagagatgtcttcacagctgtatcttaaaggatgagtaggagttcatcagaggagatggaagtcattctacaagtccaaaactatgcatgtacaaaggcccagaggcttgaagaacattttatgtttagaaagtgagagaaaagtttggtgtggttaagctttgagtacttgagggcaatagtgagataagaggactgagaagtaggcagggacaaaattatgaagggccttgcatactacgcaaaagaaaggatctttcttcctgtgggcatggggacctactgagaggctttcaagcagggtagtgatattgtcagggttgtgctttaggaaggtctaattagcagtgtaaagtgtgcgacccaggaggggacagacagcaggaggagtacgggactgccagaggctctgcaacgctctgcaacgtttggccaactccttaagtgctctggggtagatttcctatttgtttctcaattgtaaaagaggaatagccttttcttcccctacttcacatagagctaatgagactacatgagatcataagtcctctgagcctcttagaagacagcttcgaggtttggactagatggttgaaggtggagacaagcacaggctgcacgatataattgaactcatactcgtgcacattttatgcatttttaaaaatgtgtattagtcttatagcttgattcaactcagttgtgaactcaagggcaggatccagaaatcttgtgttgaccacaacccctagcacaaagggagagcactgaatgagtcctcagcacctatcagaaggttaattgcatagagtgtcccctctcaggcagaccacctgagactgaagcatcacaggaaggccacagtattatttgggactagtggcaatgttatatttcaaggttcattatctaggagtggccaaaaatattccatgctttgtttgaccaggcctatgaggaccaggcaaggcccctttacttcctgcctttagcatgacactcctctgtaaatacaagaggtaaattcatagaatttccctttctataaagtataatcaccattttgctaagaagtcgcagcctacagatgaaagatattgagtagaatatgtgcatattattattatgaacaatctttcagaatttagctacttgtttacagaaaaagtctagaaagaatgcttaaaattttatatctgtctacttagtgttgtaattaatgtagctataacatgacaacaccctagatgtttgaaatccaagttttgaaccatttcagtaatatgtggtcaaacgttatagaggggccaaaaggatatttgaagagcatccatgtgtttttgttgtgtgtcaaaaattactctagattttcatcaaccaaagccagaaaatctgaaagctttccctgcattttaaagcaaacactcttctctctctcctgacttgacagagattgtgatcagtccactgaacacaatggcatttcctcctatccacacctaatataaactccagccaatttaatggggtctattacatagtttggggatgcaagcacataaagtctttggctcttgagacactcatcttgtgtgccaggaccaggtgcagaaatacaaatacatatgtattaagcccgagacagctgctttgccggtgcttttaactagaaaggttgagccggcacaatttccatcaattatacctaaagtgttctttttcttgtggaggaagagagtacatttaattcgtctacccagtactgatgtctaaaccattaaggtttttaagttcattaaatgagaggtgaaaatcaaaagtgatattttcaactaactagaattctcagaaaatggggtttctggttaattgaattttctggcttagtggacagttatactagacagactttttttgttctatccatgttctttaacctctttttaaaatgtaygtatacatttttgccttagtaagcacagtggactgaacctgattgaatcttgctatcactaaaagttacacagtgtttctgtactctgacttctattgaataagatcattggagatagaggatagtgactaaatctgggctgaacctgagatataccctgggaaactgcttttggaaacctgtttggttttggtttcttcttatttgcttctttccctaaaaacagagtacataaaagaaaaattcatagccaagtgaagattttgatttgctaacctacattttactgaataaaaacatattttagggcaggaaaattgtacctaagtaatctgaaaaaaagtgtgctaaagaagcttacagccagaaaaatgtgaccttgcatgtccaaaggaaacaagcagtgaatttagttcatcatgacctatctactcaatttattccctagctgaattaatcttacagcaattttcacggacccactcaccacttggatttttctgtagtgcaaatgttaggttttatgaactatctaagattcttggtggtgaacagaactgctttatacttttttccatccatgtaccttaaatggtataattattgaaagggaaagatggcctatgggtccaaaaactggccttccagcacttttcaccatcatggactcatagtcaacgttcttgatacattttcaggcaagtattaccttgtttctacttccacaaaccttcgtttgtcttcagtagtgactgtttatcgtgccaaatggtgtagagagagtgagaactgtgtagaatcatactactgttgtatttatttcctaggtaacatttttggtagttttgtcacacagttaatggatttgtttctattaacatgtagggccttcttgacctaatcatttttcacacgtgttcctatgtaaattctaaatccaaacgtgctaggtcaatagctaaattgagtttatagaagaaaggaccactgcaaaatcaattattccagtttgacgctggctcatttacttgcctttgggaggacttttaatacccatttaccccaaatgcaaataacccaaaagctgaaatgattaaagtttagtgggctattatagtagaaatctggacacaaaaattgctactaaaaggaactgtggttggtcatcttagtaaccaaaaacttttaattccaaacattcaggaaatggcaaaggagacagaggcaaactgaaaaagtggtaaaatggtaaatggggatagacaagtaaacaggtaagggaaaactgtgaaaattgactaatttcaacaacattacagtattaaaatggtgaaaggggagtagacacgaaggagaaatagaagaaattacaaggaaaaaaaaagcaataggtgcagatagaaagtccccatttccccctctcctctgccccggcaactaccattccactcttcgcttctatgagtttgactattttagattcctcatgtaagtagtatcatgcatttgtccttcttgtctggcttatttcacttagcctaatatcctccaggttcgtccctgttgtcacatgatttccttctttttaaaggcggaataataatccactttatgtgtatatcatattttctttattcactcgtccatcagtgaacacttagttatctactgtacagcatagcacctatagttaacaatactgcattgtatacttaaaaatttgctaagagaggccgggcggggtgactaacgcctgtaatcccagcactttgggaggccgaggctggcggatcacttgagatcaggagttcaagaccaatttggccaacatggtgaaaccccatctctactaaaaatacaaaaattagccagatgtgatggtgctcacctataaccccagctactcaggaggctgaggcaggagaatcatttgaacctgggaggtggagaggtggaggttgcggtgagctgagattgtaccactgcactctagcctgggcaacaggcaagattctgtctcaaaaaaaaaaaaaattgataagagggtagatcttatgttaactgttcttattacaataaataaataaataaacagggcaggaaaaacttttggaggtaagggatagttttgtggcatagattgtggtgatggtttcatgggtgtatacttaactccaaattcatcaggttgtaaacattaagtatgtacagcttttggtatgtcaatcatacgtttctttgttttctattgctttaactgaatacctgagactgagtaatttatgaagaaaataaatttatttctcacattttggaggctgagaagttcaaagttgaggagccacatttggtgaaggccttttttctcgtgaggactctgcagagtcccaaggagtgcagggcatcacatggcaaggggcttagaagagatggccacattggcctttataacagacctactcttgtggtaactaacccactgcctcaataacccattaatccataaagagattattcttgagggtagatccctcatgactcaatcagctccaaaaaggcttcacctcttcatactgttatattggtgtttaagtttcaacacgagttttggaggggacaaacatttaagccatagcataccttaataaagtggttttaaaaattcaaattcaagttcagacactttctacctatgtttccttggacaagttacttaatttccctgtgctttagttttctcatttgttcaatgggcataatagtagtacctacttcacagggtttttgtgaaaatttattgagttaacaatattgaaagcacctagtacagttcctggcacagggtaatcacttaatagatgtcagctattatttttattatatgccaacaacagaggaaagccaaaccttactaccaatgaaagtaaaaaattgtaagaggtatgctaatatgtaaagagaaaatagatgtctgagcaagtcttaggtccaaataagaaaacattattggaaatctataatgctaacttctgataccagtactggcataaaagattgttgcaaaatctttgccagtaacaaactgttgaacagagcaggtatctggttgtgcctgggtaaggtagccacctgcttgctgttttacataaatttcttgatgtcgtgatcaaagcccctgacctttaatggacctaaaatggcaaatgcacacaagtaaatacagttgactgagccctgcactttttcttaaagattgattttgtggtttataattcaccagggtatttaagaagcaagatatatctggaaaaacaaaaacaaaacaactgccaaaccacaacgctgcagacacatttcagaaatgtgctttcagaaatacgtttgcagaacctggtctcttccatgaacatgtttgtgttgatgatgtgaaagacaaaatgtaccagacaattaaggaaatgattttattcaggtattgcaatagggggaatatttattaatgaggaccagctcaaagaaaatgaaggaagcctggcattttatagagacaggtaaacaagggagtcatctgtaagtcttttgggagttgtgaggaaggatggagatgggtcttcccttggaataatgtgtcagtgtaggatggtcacttgtggttaaccttttcctggaaaacaaaaggttgggggggattttttaaccattactgctttctagggtacacagggctcagataaacttaaatactgtcatttctctcttttgtttaaaacaaatatcatttataattgagccactcagaggagaacataaagctcctaagtgaggtgaagctgaagtctaagaaatagtctctcaaggactcttgttggtattgtttctgtaaagccacttgaaccatctgttgagagacaatggcaaaggtcagttgttttagggtcctggaaattaggcatattaaaagagggatggcaataatgaaaaaagaaatgttggccaggtgtggtggctcatgcctataatctcagcactttgggaggccgaggtgggtggattgcttgagctcgggagttcgaggccagcctgggcaacatggcaaaaccccgtctctacaaaaaatacaaaaaattatctgggtgtggtggcatgcacctgtagtcccagctacttgggaggctgaggtgggaggatcacttgagcctggtggaggttgcggtcaactgagatcatgctgctgcattccaccctgggtgacagagtgagaccctatctcaaaaaaaaagttaatataaaagattatattatagtaaagagccaagaattgaaccctgaaagtaaccagtccagtggattccaacgcatcagtggaagagaacttttccattttgcagcaccactcatggagctagggtatgggtactcttggcaatgttgtttgtccacagtcttggttaccgctatggtttatatgtggtttccccctgccaaaactcatgttgaatttaatccccaatgttaagaggtggagcctaatgggaggtatttgggtcatggaggcagatatctcatgaataaattaatgccctcctgcagaagtgagtgagtttttattctctcatgggaatggatttgttcccacatgactgagttgttttaaagaagtctagtatcctcagtttctctctcttgctttctctctcaccatgtgatctctttgcacacacctgctctccttctgctttctgccatgaatggaagcagtatgagggaggcccttaccagatgcagctgcccaattttgaactttccagccaccagaattataagccaaacaaacctcttttctttataagttatccagcctcaggtattctgttatagcaacactaaatggactaagacagtcatctttcatgtaaaaggtatgcatgacttgagcatttcttacaacttctatcatagtctaggcagcagcttgttcaaggagaattctagtcatgcatggtcggctgcagttctgtgttcgtctaggtttatattgagccactggagtttagcttgcagggctgcctcagatcctggaaaagagggcaagctccaagacaacttagagtcccaatagggatttgggcagtcgggttttagttctcagtgactctgagtcaggtgggagggagaaaacttggaaaagttagtttggaggatattagcaagatattgaagtaacctagaagaactgaaaatttggtaaagattgacaatttggacaagttaacaagatccagtttgatttacaagtaggtgccaaaactggtttttccacagaagaaaaggaagtcaattatctaatttttttttttttaaacagagtctcttcacccaggctagagtgcagtggcacaatcatagcccactgcagcctcagactcccaggctgaagcaatcctcctgcctcagcctcctgagtagctaggactaaaggtgcatgcccagctaatttttaaaactttttgtgaagatgaggacttgaattcccagcctcaagcaatcctcccaccccagcctcccaaagtgctggaattacagcatgagccactgcgcctagccctaaggaagtcaattatatctccaccagacaagataaagtttgcctatccatcagtaacctgtagcttataagtaggtaccaaatagctcaaagacagtgaataggactagactctgataacctagagtggtgtgccatagatgaggcagagttttctgctgaaacacaaaatttctctctatagtcacttccttttgactaaagataatctcaagaaagattattcttgaacgcaaaataaggctggtctcaaaaaacaaaagaaaaatagttaaactggagttcatcaaaatgtaaagctttggggcttcaaaggatatttatcaacaaagtgaaacaacaacctgcagaatcggagaaaatatgtgcaaatcatatatccaataagtgtgtgacatccataatataaaaagaactcttataactcaacagcaaaaaaaaaattaaaaaatttttaaatttttaaaaattttaaaagattaaaaatttaaaaatgggcaaaggacttgaatagacatatctccaaagaaggtctacaaatggacaacaagctcataaaacaatgcttgacatcattagtcatcaggaaaatgcaaaccagatccacaagtagataccacttcacacatactaggatggctagaatttaaaaacaaaaataactggaaaataacaagtgctggtgaggacgtggagaaattgaagcccttatacactgctggcgagaaagtaaaatggtgcaactaccgtgaaaaacagtttggtcgttcctcaaaagttaaacatagaattactatatgacctaaaaattccacttctaagtataaatattcaaaagaattgcaaacaagtactcaaacgaatacttatgcacaaatgtttatagcagcactattcacaatagccatacaatgaaaacaacacaaatgttacccattcgtcaacagatgaatggataaacacaatgtggggtgtgtgggtgtgtgtgtgtgtgtgatggaatattattcagctctaaaaaaagaacagagtactggcacatgctacaacatggatgaacctcaaacacattatattaagtgaaagaagccagacataaaagatcacatattgtgtgattacacatataaaatatccaaaataggtaaatccatagagacccaacacagattactggttgtcagaggctggaaggcggatgagagtgtaagaagtgaatgtttaataagcatgggttttcttttgaggtaatggaaatgttttagaactaggttgaggtgaaggttacacagtattgtaaaggtactaaatgccactaaattgtacactttaaaataattaattttatgttatgtaagttttgcctcaataagaatattaaaaagtaaaaattaagtctcattagatttagcttgattatttacataggcacagtaagaatggtaatttaccaaatagaccttaagcttgctttgctcaaagttttcataaggaatctgaatttgaaattttaaaagcctatcaagctaagaagattttacttgctgcatctataaatgtgggagaactgttctctttttgaggtcgacaaaatatcctaagcttctaagacttgccaggaagtaaccttccttactcagttgtaaggctgagaaccctgtaagtcaggtaccaggctagttttcccaagagggctttgtatgcattggctccataaagtcagccttagttccttaaaagtgtctgatcatatctgattcagtgagcatcattcacaaatatggcattccaggtaaggccttggttacataccaatgtttctaatcatgatctggtaagaagggcagacagatttttattgaaccaatgcagatatttatattgctatgaaaataagaatactcaatgagagtttccaaatcctggagaactcaggggtataagatatcatttacaaacatttcatttcagtttacaaaagcatggtctactagatagttatgaattatagatagtgtaagagaaaagagaaataggaagtgagtttcttatatatccagaaaacagaatattaaagctttagcaatattccaaacaaaacccaaatcatcccttctatcattcaggtctatgtaattagttctttttccactccaccttgggttagcactatcttattaacacacttgcttctcaactagagttctcaaaatcctgcctcagttcactagtgtggtctcaaagttgtttaaaccatctcatcataagcctgtacacaaaagtacctggcatagttcttttccacgggactctgaaaaagtgctttgttgaagatgaagccctctagcttgtagctgatgcaagtgctttcagggaagcattggtgtaaaacataaaaagctgtctacctgtagctgataaaagacttacaacagctatggttaacttattgctgatcattttcaaaagggaaaaatacaataagagttcattacaagaataataaagcaactgacaaagaggtgtagtttctgtggtatggaaaatgagataaaagtcaatccaaaaattttttttgacaaaatatcttttatttatttattttttttgagacagagtctcactctgtcacccaggctggagtgcagtggcgtgatctcagctcactgcaacctccccctcctgggttcaagcgattctcctgcctcagcctcctgagtagctgggactacaggtgcatgccaccacgcctggctaatttttttttcgtatttttagtagagacggggtttcactgtgttagccaggatggtctcaatttcctaaccttgtgatccgcccgcctcagcctcccaaaatgctcggattacaggcatgagccaccacgcccggccaaaatatctattttcttaaaaatttttagtttaggttcggggatacttgtaaaggtctgttacttggtaaacttgtgtcacaggggtttgtcatacagattatttcatcacccgggtattaagcccagtacccaacagttatcttttctgctcctctccttcctctcaccctccaccctcaatagatcccagtgtctgttgtttccttttttgtgttcatgagttctcatcatttagttcccacttttgagtgagaacatgcagcattgatgagcattccaagtctttgttgttgtgaatagtgccgcagtgaacattcacgtgcatgtgtctttatagtagaatgatttatattcctcttggtatatacacagtagtgggattgctgagtcaaatggtagttctacttttaactctttgagaaatcaccatactgctttcctcaatggttgaactggtttactctcccatcaacagggtataagtgttttcttttctctgcaacctcgccagcatgtattatttttttgaatttttaatagtagccactctgactggtgtgacatggtatctcattgtggctttgatttgcattactctaatgatcattgatattgagctttttttcctatgcttgttggccgcatgtatgtcgtcttttgaaaagtatctgttcatatcccttgcctactttttaattgggtttttgtttttctcttgtaaacttgttaagttccttaaagatgctggatattagacctttgtcagatgcatagtttgcaaatattttctcctattctgtaggttgtctgtttactctgttgatagtttattttgctgtgcagaagctctgaagtttaattagatcccatttgtcaacttttgcttttgttgaaattgcatttgttgtctttgtcatgaaatctttgcccgttcctatgttcagaatggtattacctaggttgtcttccagggtttttatagttttgggttttacatttaagtctttgatccatcttgagttgatttttgtatatcctataagaaaggggtccagcttcaatcttctgaatatggctagctagttatcccagtaccatttactaaatagggagtctttcccccattgcttgctcttgtcagctttgttgaagatcagatggtgataggtgtgcagccttatttctgggctctctattctgttccattggtctatgtatctgtttttgtaccagtaccatgctgttttggttactgtcagcctgtagtgtagttcaaagttgggtaacatgatgcttcaagctttgttctttttgcttaggattgtcttggccatttgggctcttttttggttccatatgaattttaaaatagttttttctagttctgtgaagaatgtcacatgtattttgataggtatagcattgaatctgtaagttgccttgagcagtatggccattttaattatattgattcctcctatccatgagcatgggatgtttttccatttgtttgtgtcttctctgatttatttgagcagtgttttgtaattctctttatagagatctttcacctccctggtaagctgtattcctaggtattttattctttttgtgtcaattgtgaatggaagttctttcatgatttggttctcgggttgactattgttggtatgtaggaatgctagtgatttttgtacattgattttgtatcctgaaactttgctgaagctgtttatcagctgaaggagattttgggctgagattatgaggttttctagatatagaaccatgtcatctgcagacatagtttgacttcctctcttcctatttggatgcccattatttctttctcttacctgattgctctgaccgggacttccaatactatgttgaataggagttgtgagagagagcatctttgtcttgtgccagttttcaaggggaatgcttccagcttttgcccattcagtatgatgttggctatgggtttgttatagatggctgttattattttgagatatgttccttcaatacctattgagagtttttaacatgaaggggtgttgaattttattgaaagccttttctgcgtctattgagatgatcatgtagtttttgtctttagttctgtttatgtgatgaatcacatttattgattcgcatatattgagccaaccttgcatcgtagagatgaagcctacttgatcatggtggattagcattttgttgtgttgctggattcggtttgcaattattttgttgaggatttttgcattagtattcatcaaggatattggcttgatgttttcttttttgttgtatctctgccaggtttttgtatcaggatgatgctgctctcatagaatgagtcgaggaagagtccctcctcctaaattttttggaatagtttcagtaggaatactaccagctttctttatacatctggtagaatttggctgtgaatctatcaagtgccaggctttttttagttggtaaagctatttattactgattcaattctggagctcattattggtctgtttagggtatcagtttctccctggttcagtcttaggagggtgtatatgtccaggaatttatccatctcttctgggttttctagtttgtgtgcatagagtgttcatcatagattctgctggttatttttgcttctgtggggccagtggtaacattcccttcatcatttctaattgtgtttatttggatcttctttcttttcttctttattartctagctagcggcctatcttattaattttttcaaaaatctaacttttgcattcatcaatcttttgaaaggtttttcatgtctcaatttccttcagttcagctctgattttgcttgtcttatgctagctttggggttgatttgttcttgcttctctaattcagttgcaatgttaagttattaatttgagatctttctacctttttgatgtgggcatttagtgctaggagtttccctcttaacactgccttagctgcttcccagagattctggtgtattgtatctattttcttattagtttcaaataacttcttgatttttgccttaattttattatttactcaaaagttattcaggagcatgttgtttagtttccatgtaattattttgttgcatggctttgagtgattttctcagtcttgacttctatttttactgtgctgtgtcccaagagtgtatttggtggtatgatttcagttattttgcgcttgctagggattgctttatgtccaattatgtggttgattttagagtaagtgctatgtggcaatgagaagagtgtatattttgttgtttttgggtggagagttctgtagaggtctatcagatccagacaaaaatgtctatatacataatgattagcccttgtcttagtacatctgtgttcttttaaaggaatacctgagtctgggtaatttataaagaaaagaggtatttggcttacagctcttcagtctgtacaagaagcatggtgccagtatctgcttctggtgagggcttcaggctgcctccacttatgacagaaggtaaagggaagccacatgtgcaaatcacatggtgagagaggaagcaagagagagggagaaggtgtcaggctctttttaacaaccagctcccaggggaactctagcagtaactaatagagtgagaactcactcattactgtgagatcacaaccaagccatttgtaagggatacacccccatgacccaacacttcccactaggccccacctccaacactggggatcaaatttcaacatgaggcttggaaggccaaatatccaaactgtagaaatcctattttcaaagaagagagggtattatatgtaatttataaaaatgcatgaacatcatctttatagagaaaaaagactcagatataacatataataatcctgacataatatatcatcaatataccaagcatataggttgaatatacccagaatatatcaagaacatcaagtaaagagattcagtaatctggaatagttcttaaacatgtgtatattaacagaatttcataggtaaatgatgtgaatccccagttgaaaactaatgactggaaaaatgctagattcaaaacaaagaagcaatgtggagaccaagttaacattttaaaaagctgaaattattactgaaaacactatactatagttatctaatatctagcaaagcagcatcaggattctgacatatctcggccagtgagagcactaatgaatctgtagaaacgttccatacagcatacaatttctaaaatgtttatgctaataacattttcctataccaatttaacctagaaaaagcaaagcatctgttctgatttgacaactcttcccatgcaactcctcaatagtaatatattgaataaatctaattctttctagcacttctctttcaataaggtgaaagaacaaatcttttttttttttttttttgccattttaacagtgaggaaaccaaattctagctttgcatcagaatatttgatactaaagttctttttggaaatattgtaaatcaactcatcaaaccttagccagccacctcaacaaataaaattccctttctgtgatccctctacaactttctatatctatatgcatcctttataacaacttctttaattggcaaaaaatagcatgttcattaccaggcccaagtatacataacttttctgcagcatgtagaaataagaagcaaaagcatacaaaattatatgtagtaattaatatttcagcattctcttacttagaaatggtctaggtatgtaatgaatattcattaattcaatttagtatcagctcaaagtttttagttacctaaagattttataaattatcttcaagttgatatactgcaaaacataattactgttgaaataaagtttgtcagaataacgactcaacttggttaaacaaatttacattttttataatcgtaaacacttaggagaagtaatgttagctcattcaatcagtaaacctgtctatgttgaggaagaatatactcaagtagaaaaaaaatctacctgtatattatgcccaacactgataaatcagaaaagacatggctggttttagtaagccaaaaattactaagttagtctcatttgcccaagatttacctaaattatatgaacttgaattcttaaagtatttgagtttgtttttataggaatactttttttagcatattgaaaatcttgaacgttcaattgccttattttctggggattttaggaatattctatttatctaaacacttattatttctataagccaatgagaacagagctcctttaagagattttatcatctaatttagtaatactatccagaggtagaaaaatgttacaaattcatacaatgagacataaaggcctttctgaatgatagacatcatcttcgtcatcattattattattcaggctattgccatgaggagaatgttcattagtgtaaggaacatcttaaagaaaaggaagggggccacctgcttaatggaggcaggtaaataaaggagtcatctaccagtcttatgggcatgctgaggaaggagagagatgagtctttccttagaatatgccagggcaatgtggtcctttgcagttcgccatttctcgtaacgcaaaagggtggagggtttcttaaccatcactgcttttgcaaaagcacagggctcaggtaaatctcaatgttgtcaatgagaagagtctactttgtcaattttgtctatagcttttctctgtattctcctttatctgccatattatttctggttgccttttttgtttggatgattggtttttttttttttttctgtgtttatgccttatctccccaatttaattgtaagttctgtgaggaaaggaagtatgtcttgtattgatttgtactcttcctccacatctctctcctctttttgcctagcacttagtgttccgtcccatctacctaaaagttattgatgttcagaaggtcagcaaattatctctttttttaatgtgctaaggcagtaaacttacaaaatgtaagcttttcataattggaaaatagcatttgcatctaagaacttccaaaatcacacatttaattcttatttaaagagaattcatagatggagaaatctttttctttaattggtctctacctggttgcatatctaaggccaagctattctttggctagatgattgccgagttcaccatcatgaagcaaagtcagtgtctaaagatatttttaccaaccttctgcttgccagtgtacatgtcttattgattcagcctgtgaaccagggcattatttagaatatgaaatgttattatggaagagatttcatgaagaagtttatgcattgtgaaggcactacaaagagctttacagtctcatagtagcaaagatgccattttaactgttgcttatgcctaggcaatctcaaggagaactcagaaaaaaatgggctggatatttgaagtctctgtggaagtgaaataaattaagcatttaggatgaggccttaaaaataacttaaatacactcttgatgataaagaatgttatttgacatctaatcagcaaggcttaatggaagtgtagtaaaagagcgggttaaccttgacaaggggttaaagtgacgcattatcactgatagcacaaaagttaaaggacaccagtgaagtcaatgaagagaattttagtgaagaaaacaaaataactttataaaagactgcttcactcttcgttgtaataattgcatttacagacaggcgaccacattatactgcccaggagattatgcatttgtatattctacactcagcttttatgagcaacaagtgcaaaactaactttttaaaaattctagtttgtgtcatagggtcagtacagagaatccaatctctaacatcttctacatctggctgagcaagattgtctttaaggcctcttctagattctagctttcttaaagtcctgtaagtgattaccagtgttcctcatgatgaccccagggtatacaaattttttgaagtgattcctaaatccagggaaaggtggttctctcttgttcaatatagttataatattctaatgctttgaaaatctgggatcatgaatggaaaatattaccaatttacccaaatatttactttactgaaacacttcattccctgatcattctgggtcatttacttataatctttgtagatggatttctgtttttcttaaaagaagggggaactttaggggactagatctcaagggttagatccttggctgtaaagactcccttggattgctttttggctgttggctgtagcaayttgttttcttacagagatgaagcatctggtttttgttatctcaatgatgctgtcctgggaatattacgattgcgacggaaatttgagcgtattctctacgtggatttggatctgcaccatggagatggtaagccctttggttttaaagatgctttgctgcgaggacagcaggtttttatcagttaagctgcttctaggcaactggtagaaatgtctgctgtaattgaaattttcctaattgagaatttaaagtaggtagtgtagtgattcctctaattgatgcaattcctgctttgctgcccaagccaggctcctgtaatttcctcttctctctcctcctgtagcaagcctctagaactaatagagaatgttaagaagtgaaaatcttacctagtgtttactccagtgctcagtaacctccctcaggtcatttccattcattctaagggaatctatagggatgacagtcttgtctcttttcattgatgcttttctcaagatagaatgggcgtatgatgggctaacattctgaatttttcaccaataggttgccaactcgtgtagtgatcagaatctgtgccattttctttgtattgctaaaatatttagtgccgtacaaacaggacatcttccctaacatttaatagcagaatcacttagcagtttgccttaacccattaatcctctcttagaagactccactgacaggatttatccgaccctcctatgtattttccatctagaatgtagagctccagtgacagttgccacattctgtttctttaagcaatcctctctgggacacgtagtatttccatttatttaagaacacttatcctgtaaattcttagttaaaaatactcctccctcacatcaatgattgccatttccctgtttccagggattttttttttttcagacaaactaacataatcaaggcatagagaggaaaagaatattatatgtctgaagctagggtcagctccactgccaaaacagagaaagaaggatgaaattgttgagggaacctttccagagagcttcatctgcatggatgctaccatggaacgatgacagaaaattaaaggtaacagagagaagagaggttaaaaccaccaatatactactttgagaaccattttcactgaatatctgaatgctcaaccagtgcaaaacatagccttgctcaaaagccttcagagactccttattgcctataacaaggggtagcatttgacctatggcttgtttttgtatggccagtaagctaagaatggttaagaatggtttttccagccaagtgcagtcgctcatgcctgtgatcccaatattttggaaggatgaagtgggaggactgtttgaaaccatgagtttgagaccagcctgggcaacaaagtgaaacccccatctcgaaaaaaattagctgagtttggtgttgtgtgcttatattcctagctacttaggaagctgaggcaggaggatcgcttgaacccaagaggtcaaggctgtagtgaattatgatcgtgccactgcactccagcttgggcgacagaccaagccattgtctcttaaaaaaataaaataagaatggtttttccatttttaaagggttataaaagagaaaatatattttttaaaaatgtgtctgtgtgtgtgtatatatgtgtgtgcgtgtgcaatagagaccttgagtggtttgcaaagccgaaaatgtttactatttagccacttagttcattgacccctggcctacagcagtggttctcaaacttgaaagtgcatcaggatgacctggagaagtttgttttaaaatgcagattgctgggccatatccaccagatattcagatttagtaggtctggcatggaaccaaagaaactacgttttaatacctcagctgttctacaggccacactttgaaaaacagtggtcttcaaggtagtccacactctttacctagtctttcaaggcctaccttgaataggtctcacctcatctttccacccttatctctcattacttgctgtccaggctacactactcaatgagcatgtctaactattcatgacatgtctcactattcatgacatggctcagtattcccagacatgtctcattattcccacctccctgactttgcctccttttttcctaatttagttttgtttcacctgtcccaaggtctacccatttgttcaagttccaacagtaacagatttgccctgaccactccagctcaagtgttctctccctcctctcaagtcccgtattattcatatcaccaatttgatatttcattacatattgccttgtatttctaattaattttttaatgtgtctgtgtcttctcttcccatagaaactataagttccttcagagcagagatcaagttgtttacttcttcctgttttatataatgccttgaaccaacagtactatgcatatagtagtggctcattaaaatatttgatcaatgaatgattatgaaattcaaactattagtatcggagtttaagaatacaatcaactctacagaaccacataagaatgaactgaaactgtcacctgaaagtgttctttccatttgcaatgttatttctacacccttcagagtttcctgttttagccaacttttatggtgtgtttcatttcagtttatttcccctcttcagcacctcccttacagtgacccctgccccaccccccaacacttatgcatttggtttattttaaatctcccatgattacataactagcatcctgtggtggcttcactagccacccctaccccatccttgccttctttcatctacctaactactctcctctttcccaccaagtccatagcttcctcctatctgtgtacatctcctttttaaatatgattttataactgtgcctagtggtatttcccatgagaagaaatacaaatggccactaaacttatgaaaaggtgctcaacactctaatactcaaagaaaggcaaattagagcaaaaccattctttctgcctaagattaaagagaataacaatagtttgggaactctcatacatgattggtccaagtgtaaattggtacaacatttctggattgatcaataatcaggattttcatgaattatccttgtttaagacttcatttctaagttgaaatactattttcatttattttgtttgttttattttttttacttcatgctttttgcttagagcctttaactggatttaactgcctccctagggccaaacataaggcttgggaaattcaaacatacctgttatatataaatagagttaatatttttttaaagtcgctgttggggctgtagtgaagactgaaaacattaaataaatacagagacaatttctttgtttgaagtaagaaagaggacagtacctgaatttgctaatagtcctcccattttacagattgattatctgaacatagtgtgactatatgtgattctgagaggaaaggggtggaggtgggcagtgtgtttacctgtatacgtagaggcttgtgagggttactttaaatcccagcttttatctcccaggcctctaatcgtttactcactaagttaaaatggaaaacagacccctttctcgcccatctttcttcagattttaaaacactcttataaggctgctattaggagacaaggtcacggctgttttcagccttccatgttttagccagaaagatgtactataagttacttatttataaccaaatctgcattatagaaaggcactttataattaggtttttggtatataatggctaatgtttctattggtcatatttttcaaagggttatcacgttgtacgtctttggaaaaaatcccaagactttaactataaccacttaaacaagacaaaacatacaacttgtaagatggttccagtttcccttattcaattctgttgataatgcctcaattctaggctctcgcctttccctactttttagaacaggttgtcaaagagagcccagacatcccattgcttggaaaggggaagtccagttatagttttccatgagtttgaaaaggaacccccaaacttcacttggggccaaagttctacctcatcttgtaattaygagattagagaccagaggttcgtattacttttattcctcagcttgttagttttatattgctgccttctcatctaccctccttctcacagctgctttctagattttcagatgttgaaaataggaatgccatatgtgaagtgattcttttgatgtttctttatctgttaggtgtagaagacgcattcagtttcacctccaaagtcatgaccgtgtccctgcacaaattctccccaggatttttcccaggcaagtgatcataaactcagtattacatttgatgactaaatactgaaattcttctacacatttcttatacttggacagttccatgctgttaatgccttactgccacaatcctatgcaaaatttttttttttgcattttcattcagataggagataattttgtaaatttcttttttattatactttaagttttagggtacatgtgcacaatgtgcaggttagttacatatgtatacacgtgccatgctggtgtgctgcacccattaactcgtcatttagcattaggtatatctcctaaagctatccctcccccctccccccaccccgcaacagtccccagagtgtgatgttccccttcctgtgtccatgtgttctcatttttcaattcccacctatgagtgagaatatgcggtgtttggttttctgttctcgcgatagtttactgagaatgatgatttccaatttcatccatgtccctacaaaggacatgaactcatccttttttatggctgcatagtattccatggtgtatatgtgccacattttcttaatccagtctatcattgttggacatttgggttggttccaagtctttgctattgtgaatagtgctgcaataaacatacgtatgcatgtgtctttatagcagcgtgatttatagtcctttgggtatatacccagtaatgggatggctgggtcaaatggtatttctagttctagatccctgaggaatcgccacactgacttccacaagggttgatctagtttacagtcccaccaacagtgtaaaagtgttcctatttctccacatcctctccagcacctgttgtttcctgactttttaatgatcgccattctaactggtgtgagatggtgtctcattgtgattttgatttgcatttctctgatggccagtgatggtgagcgttttttcatgtgttttttggctgcataaatgtcttcttttgagaagagtctgttcatgtccttcgcccactttttgatggggttgtttgtttttttcttgtaaatttgtttgagttcattgtagattctggatattagccctttgtcagatgagtaggttgcaaaaattttttcccattctataggttgcctgttcactctgatggtagtttcttttgctgtacagaagctctttagtttaattagatcccatttgtcaattttggcttttgttgccattgcttttggtgttttagacatgaagtccttgcccatgcctatgtcctgaatggtgatgcctaggttttcttctagggtttttatggttttaggtctaacgtttaagtctttaatccatcttgaattaatttttgtataaggtgtaaggaagggatccagtttcagctttctacatatggctagccagttttcccagcaccatttattaaatagggaatcctttccccattgattgtttttctcagtcctgtgcaaaattttaacacaggtcacctcaggtgacaataacaagaagaatgacattaaagctgtttctttttccaggtgatttttatggactgttaacagatcacttatgcttactatactagtagacaccccatgcaactcctaacatcctgaataattgcagtgataaattgatgttatgtcaacctaaaaagcatgaagccaagcaaaggagttaatctcttattttttcatttgatccagtaaggtgaaaactgaggtttttcagtttccttatgatttgcctgcttctccaagattgtttacaatacttacttctttatataatttttcttaatttctttccctagaaatttccctatcaggaaatcctttaagttttctgggttctcatgttcctaataactgatcatagtgctcttctcttttataggaacaggtgacgtgtctgatgttggcctagggaagggacggtactacagtgtaaatgtgcccattcaggatggcatacaagatgaaaaatattaccagatctgtgaaaggtatggcagtaacactagccagtaataagtggattgcagttctgtaggatgaaatggcccccatctcacaatgtaaacaagaacaatgtaaaaaagaaaacatctatatacctataaagcttttgtatactggtcattatgcttatttgatcagtagctatccgctgtatggcagagccaagcagttggaccagagccatgctccaggttggatcttactcaatatgattaagcccatcccaagagcagagctttttttgctatcctgaagaatcccttatttgctactttcttagctaaataaacctacatgtgtcttatttcattaacctggcagggttcatttcagttgtcagggttcattatggagacctgtgctttcttctactggtgtaaatattagagaattgactattattattcatcatgcattcttaccttctatccactgtgttaaaattggagtcagatacctgttctttctacaccatggctaaggattaagttacagacaatcgtagacagacagattggtgccaatgtgtggaccactagagttgaaaagccttatggaatgggggtggggggttgtgttaaactcatattcataaaaattgagattggtcaggcacaagtggtggcagagaaagcaaatccgaatagaagtcagccagtcaacattactgaaggtaagtaacggggattgaggtactcttgatccctccccaacttagctcgtatttctcccaacctctggtggaggttcttcccaaagaagcctgcctgcactggccatcatcactggcagttgtataaacaaagcagaactattaaaaaataaaaactttatgcttcaaaagtgcttcttagctcaagagatttggtgagccaagtcatcattcagttattcagcagcataagcctcttcataattttgatcatgtctcctggctacctctgtattatcatgctgaaaaaactttttttttttttttttggagcctgccatcaatggtttaattgcccttctttgttccccttaagctctcttctgtccttgagatgtgcagatcagagctgcttatgtaactttaccaataaagatatcctgcagttctatgtaaaaggagaattattttgtttttcttttaatccctttcttaacagtgcctgattttgttacccttttttttttttttttaccataacagaaaactaggttgttctcttcagtgcactgtccacagtgtctcctcgagccctttcctgggtcttaattgaaaggtcagcactcatcatccagcaagtatagtttgtaatatctagtgctccctagatggatcaccctaaatggatcaccttacatgtaccccttacaaagccctaaatggatcactttacatgtgcccctattgaaggttatctgccaatcataaaacctcctgagatcttctttatctcccatcaacttggcatttcactgcctgggaaagctgagtattatctgtagacttgaggattttccagtgcccacccccaaggaagtctatttatccttcttcagtcagaaaaaatatctgtttctaccctatattttctcttttttttctgtagaccagttcctactacatgataaaaaatattttaaatcccatggtaattcatgtttaaaaatagccttggtatcaaacctaatcagaagcatttttaaagtaagtttagccccaaggaaaagatctgtagaagattacacatgatttcgctttacaaaaagcatgatgccacccacatcccaatagattgatggcttttgtgtacaggaggctagcatttattaaaaattcttccagcttgcctactgaagaaccagacactcatcagtttatagttcccagggcccctttgcctgtggacccacattggcaatgcaagccacacagtgatcatccagaataacaggttccaggttttcattagaggtataataattttttttctttgctttccttcagaagtcaagtctggtcagggcattatgtgaaggcacctctgattccaagggtaccaaggaggcttcctggcccaaacatctctcctatctgttggattaatacctgaaattcctttaacaggaaacatacttttattctacaattagaaatagtccttaaaacgaaattttggcacaacctctcatcctcacccctgctgtactatagaagtatagtttcacagaacctttcttttttggggttgtggacagggtcttcccctgttgcccaggctggagtgcaatggcatgatcacagctcactgcagccttgacctcctggatccaagtgatccccttgcttcagcttcccaagtagctggggcaaacaggcacacgataccacatctggctaatttaaaaaaaagaaacttttagtagagatgaggtgtagcttcacagtgccattcttgagaatgaattgtgaaagggtcagagcatgagctccttgagtattctgaggagcaggaattgcctagtggagcagtagagggaaaggggtaccaaaaaccacagcgatctttgccaagagttttgcagagggccagccctggtaactagatcactcagtcccaggcattatgcctttgaatacttctggtatgtggcttggaaacagtctcttacacatttgccattgttacctctgacccttctgcctacctcaaaagatatattacacagaggaatggcttaatctttttgtaaaaagtcatttagtttatctactatcttcttttcatccttttattttattttatttatttatttttatttttttggagatggtgtctcactctgtcggcgatctaggctcactgcaagctctgccttccgggttcacgccattctcctgcctcagcctccccagtagctgggactacaggcgcctgccaccacacccgactaatttttttgtatttttagtagagacggggtttcaccgtgttagccactatggtctcgatctcctgacctcgtgatccacccacctcggcctcccaaagtgctgggattacaggcatgagccaccacgcctagccccttttcatcctttttatttcatgaccccactggttctctggctcactccttacttgtgatgtgtaaaggacctcttattgctggttcacttataagatgctctcatttttatttgccacccaatttctagtttgctcataaattgctcctttttccttttccttctttctttcttctttcttttacttttcttccttccttccttttcttgtcttgtcttttccttttctccttttccttccttttcttcctttgttcttcccttcctccctttctttcctcctcttttcctttctaaaatggttttttcctctgctgtagccttttttactttgccagctagtcaggcaggaacttaatggttttagtttaagcttgaacatacccccttcagttaaaaattggcttagagtttttttgtaatagactagatatggaatctttacatgaacatttcctaacaccaaaagatctcaagctccattttatataaatgacagatttcacagtgagatctccctagatcattcaattctaagggcaagggccactaattcccaaaagcttcccataattttcatgagagctgctagagttggtatcacaagtagagccctgttttaaccagcataaaggaacatcatcaacattgctctggtaagcatacctcctccttcaaatggaagcctatagtcctagtatagagatgatagaggtatactatattttttatgtatgtgaaggcctaaacctgaccccaccaccaccccatccccgggccacacacgcatatacccatgaaggttggtgggaaagggaggctgctttgcgaaaggaagggtttgctaattcccaagttttatcatctgagacaggaaatattacgctgcctatgtttaacccatttgctctctaagtataatatatttgaatgcaatctgagatagtcttaataatgtttaatctattacctaaaactctgtgttgacaattttgggagcatttatagttaaggattctgagagaaaaggacactaacaagtatgaccttgctgttggttaaagggagattttgataaatagtagggcactattctgaaatctcaaatctttcaggatgacccaactacttgtccactctgaacttccatgacatatgtgaagttcgaatgaagaaatttagaattgtgccaatacttcttaattctcatcctacctatcattttatagccctaacagccagaaagttttctttactaaatatctgattatcaatagatatcgcataagaaaaccatatatgaagtgcttataatgtgtatgggtgaagttgacagttcaaagttttgaaaaacaatcatgtttttttaagaatattcaactattcagcttagtaatttcaccaaaaggaagatacattgttaaacagacttctcaacaaataggacttataaaagattctattaaaatggagttctcattcagtagcagtgtttatatccatataggcaaaactccactagttagagctaccaacccatccagagaaatagccttactctagtgaaccagagttcataatagtagtcattaaaataagaacctacctgtatttggtccttggcctatttgccttgagttctatggcttatattgtatagctcaaaattgaaagaaaccttttcttccccatcaaagactattaacttaaaaaaaattcagagactgcagaagtgaataaacaacttaagattcgtacctctttccttttatgggagaaatattacacttttctattttaaatatttattttatagctctttaactacttttctggaacattagttctgctgttaacagccttacccaagtagcctacccagaaaggatttgctctctaggacaacagcagagtcattaaaggaatagctcattaaagcctaagtttttattcctgggtagaatctttttgtctatctatactgagccccactgatacccaacaaagaagaaaaaaattatagtatctttatattatatgtttatggcatgataatttttcttagactctgtcattgcttctgaaatatatgtcagtggtattttaggcataggatcaattcctggggtctggggccaaaattcagctctctgaagccactctgaccttcctacaaaagagttgagcacctcaagtcactttataaggtgtgttagtctgttttgcattgttataaaggaatacctgtgacagttatttataaataataagaggttaatttggctcacagttctgcggactgtaaaagcatggtgccagcatctgctcagcttctggtgaggcctcaggaagtttacagtcgtgatggagggcaaagggggagtcagcatatcacacaagagggagcaagagaaaaaggaggaagttccaggttcttttaacaaccagctcttattaactcataaagtgagaattaactcattaccatgaggacagcaccaagtcattcatgaaggatccacctccaagaccctaataccttccaccacgccctacctccaacattggggatcacatttcaacatgagatttggaaaggacacacattcaaactatatcaatagggttttaaaaacattaaccacaagaaggagagttggggaaggagctaccaagctacatagtttattgtttgcctgatgctgtgcttaacatttgacatgcattcttgtgtgtgtatctttaagtataataaaagcattttattcattcatttggccaaaaaatgtattgtctcctctatgactggtacttgcaaatgaggcagatgaggctcctgcaccctggagcttaactctaagggaacccttgcctgtgccagtaattacactaaacatttacattgcttcatttgatccctgccgcaatctataatacctactaaagtagctattagtattgccattttacagtgggaattgtaatatgttctgatttctcatgagatatgagaaaactggagaaaagattgacttgcttaaggtctcacaattagtaaatggtgaagcctgtgtttgaacccacgtctgtctgcctcttaactattgactatattgtccccaaagttgtcacatggaagtgagaaacttaatggttgcaaacaaattaaaaaacaccatccctgggacttcttggaaaactttatctcaggggattgcagaaaatccccccccccaaaatagaaaccatttaactatgcaaatgaaccacatgatccacagtatatgcaatccattgtatttgtttgtgtaagtgcaacttagatttttgcccaaaaaagaattgtttaatctcaaggatttaatttgtaattttatagatagaaaacaaggataaatattgccagaattaacttcttaggttttcaattcctaaagtttgtaaacatgcagattctgtaaaaccacctttcccttcattttcaatggagaaaatcctgacttcctactttagaaagtgaatagtgtcccctgtcattttacagaggtcttctcatggaattacatctttttcatgtggttgttttagatgagtatagctaaaaatttttaacatcatgcatttttaaactataggcaaaatttataccacctcttggtccttgtggaaggccatatctgcataaagggtagagattctccatccatgctaagctgttcaaccagtaccagttgaataaaatgaggaccaagggacatcactaaagggcatttaagggaagtgtttcctttcactattgacttactgttaatatttaaagaagagatgttttaattatgataggtttttctttcattataataagtcatctagaatttatcttccacctgggactccaggttatcattcaattttagaagcaggtagggctgggcacaggtggctcacagctgtaatcccagcactttgggaggccaaggtgagcagattgattgaggctaggggttcaagaccagcctggccaacataataaaaccccgtctctactaaaagtacaaaaattagctaggtgtgggattataggtgcgcacctataatcccagctacttaggaggctgaggcaggagaatcacttgaacctgggagatagaggttgcagtgagctgaaattgtgccactgtactctakcttgtatgacagagtgagactctgtctcaacaacaaaaaaaaaaggaagcaggtagatcttcagtgaaagagagccgaaaaagtgtaatttactcctttaggcctggtgatgtggcaaaagcaatgcatacacacacatattcataaataactattttaagcgatacaaattttttaaaattctctttcatttgatgagaagggatgaaccctctagaaatttgcatgtgagaacaagtaattatttagccttccatcttcatccctgatatggtctagctttgtgtccccacccaaatctcatcttgaattgtaatccaaattgtaatccccacgttttgggggagggaatcatgggaggtgattagatcataggggcaattccctcatgctgttctcatgatagtgagttctcatgagatctgatagttttataaggggctttccccccttcactctgcccttcctcctgccgccatgtgaagaaggacatctttgcttccccttctgccatgattgtaagtttcctgaggcttccccagccctgcagaacctctataaattacctagtcttttttttttttactttaagttctaggatatatgtgcagaacgtgcaggtttgttacatagttatatatgtgccatggtggtttgctgcacctatcaacccatcatctaggttttaagccccatatgcattaggtatttgtcctaaggctctccctcccctggctccccaccccctgacaagccccagtgtgtgagtttcccctccctgtgtccatgtgttctcattgttcagctctcacttatgaggaagaacatgcagtgtttggttttctgttccagtgttagttttctgagaatgatggcttccagcttcatccatgtccctgcaaaggacatgaactctttcatttttatggctgcatagtattccatggtatatatatgccacattttctttatccagtctatcattgatgggcatttgggttggttccaagtctgctattgtaaatagtgctgcaataaacatacatgtgcatgtgtctttatagtagaatgacttatattcctttgggtatatacccagtaatgggattgctgggtcagatggtatttctggtagatccttgaggaatcgcaacactgtcttccacaatggttgaactaatttacactcccaccaacagtgtaaaagcatttctacttctgcacagcctcaccagcatctgttgtttcctgactttacagcagcatgagcacaagctaatacattccccatttcattacaatctaagaactgataaaaaattctttacaaacttattctacctctcttcagttgggtcacagctacactaccttgataatcactagctcactgtcgcccagtgattaaggtaacagaagctgctaattcattctataagccttgcactttgaactcagccctctgtaagtaaggtatttgtgttaaatgcttttgttctatttaataaacttttatcctgcctctccggggtatggcagatgtaaaattacctgttgttctggaaaatggatgactcagacactaattaaagttactgttaatattagccacaggtggaaatgaggccaaagtgagccattcatttattgttcctactttgatgtgtcttttaaaatattaaattcaagaggcactaagtgtgtcagaatgtaggataattaggaagagggagatactgtgcttcactgagttatcctgaaacctcagtcagtgaactcaccctgcctgtcctcaggatttgtttagggttgcagtggcgaaccggtgttttctctcacctaatccttagggctttaaatccaggtggttagagggacagttcttatattctccttcctctctcaactgatgtcttttatgactgtttgctgaactgcacgaagtagccctgccatcatgacagtccctcccaccctgagtaaacaagtcttcataggtatattgtttcatttgtatcaaggaagacagtcttctggaattctgtaggtttgtgctgtttctctgatgtgcctcttctctggtctcttgttatgctgactgatccctgcctcctggagcaagtgacctgattctttggcagcagttgaataagttctgatgctagaacatgttctgaagctctccagagacaggaagaccttgctcctaaatggaaatcttgaaaattacaccctttaacataactctgctctgaaaagaaccccagacttgactataatctgggcttcataggatattctaacatcaaaattcatattattcctctcagctgctctccaccatgcaccccactaacctctgccctaatcctctctctcccacattctttagtcactgctctgtcccttcagtgtagcctagaaaaactactgtttacgttttgcttcgacatgttatggctttgaacgactgtgcctgacattgccatacacctagcagctgccgagactgatgagctgcctcgttgggatgtgttgacaaggactatacagagatttagttaaacccagtgtccagcacctgatgaaaaagcctgatgttacgttggctggactttgctctgtgtgcactgttaacccattgtactaccaggaaagagccatgtccattggtacttaaagaagaactaaagggccgagcacagtggctcacaccggtaatcccagcattttgggaggctgaggcgggcagatcacttgaagtcaggagttcaaaaccagcctggccaatctggtgaaaccccgtctctactaaaaatacaaaaattagctgggcttggtggtgcgtgcctgtagtcccagctacttgggaggctgaggcagattgaatcgcttgaaaacccaggaggcggaggttacagtgagccgagatcacgccactgcactccagcctaggtaacagagcaagactccgtcaaaaaaaaaaaaaaaaaaggactaaaggaaagaactcctcaaaaaaagctatatcaaataaccagctaacaagttaataagcaaaagggcacgtgtgtgtgccaggggctaaaagcaatgtgtttgcctggaggtgatgcaagtgccattgcatagtgagccagaagctaaggggtttgtgtgcgccagctccgtgttgagggggatggaggaatagagaggggagggagaccatcttaaacgtgttaggggtgaagtggaaaaatatctatcctatttaaatacaggcaagcctcactaactcagcctaattagaggaaagccagtctgaatcatgggatatttttaaatgcatttttattactttcaagcactggacatgctagtaattcaaactagactaacagcatagtacagcacctcagggaaggggctttaagaatcatttgtaattagcatatcaattatttgtatgtaagtggatatgcacaaagtgcataaaaagtttattctcctaagtaggacaaacattcccccgtgcagtcctgtttacactattaatttgcttagccagccctttttgtgccaagatagatgtatgtaagaaatgcttatttcctcagggaagaatgaatcgcttccctgtgtttagtccagtaactaagaagcggagcgccacttgattggtttgggatttccaggacatggagttttgaatttgcatacagactagagagatttcatatggagaagatctggcagccattgccagagatccagtttccccatctggatttcattgaagtgatctggatttcatcaagcaacaggacactgatcctaaatgatccaccagacactctaacataggcatgtttaacatacatcctgccctagaaaaataactgttaaaatatgatgagttggagttattctatgtgcagtacttaaaagtaataaaaatgcatttctttttaagtcccacaaaaaccatgcaatgtcaagttaatgatgaaaatcaatccccaaactctttcttgcacacctcattgtatgacggcattgcagagatttccaatcatctgggaaaggatattatattttgatgagctgcaccaggtgctaactatatggcagaatttcggctttgaatcttagggaggccctcaggggtaaagaagagtgagggaagggctaggagcatgtttattgttaacaaatcactattgttcacctaagcttgaaaagtgagcaattgaattggaaaagaagaggtatcagttatataaggaaggtagaaaatgtgattaggaaatgagaaacagagatataggcctttattcccacccgtatgtattaaactgtgctctaggtaaattgtgaattcttcaaggcttagagagtaaaaactaaggcagagagcataagcacaagcagtaaatatacacgtaaatgttctaactatagtttggaatgactccaacactcccctttcccccaagggcatcgctatccagggtctgcaaaggccaaatagctgtttggcttccaatctgattttttgcctaagaaatcagagaagtcggtttcaattttaataatatattctcccaacctctatataacagaaaggcacttgtgtttctgtcccttcttaaagcgaattttgtgtttggtgaaaggtaatagattgacagcactggaaaatgaattactgtattcccagaacaggtataaccgggcagtgacacgatgaaatttctctctgcctttggggaccattagaatactattcaggaagtcactgctctggtgtgctgtgctgaactcaccagtatcctagtgggctgaaagaattaacatagcactcaaagggcctgacttgaggccattcatttattcattcaatgttatggagtgcttactatatgcctgatgctgggagaagactttcacaaatgttatatcatttaatcctcacaataaccctgtgagggagagaatattattgttttacagagaaggaaactgaggttcagggaagtgatttgtccaagttgctatacaaacactgaatccaaccttatctgactccaaattcagcattctccctgaactgagtgctgtaggggttgcaaagggggacagatgagacatttggtcaaatgatgtgacacagagcagaatgcagtctacactatgagcagtcctggtagttacagagcagttaaatgacataccccagatcaaatagcacagatagccttaggattcatattctttaggtcttcttccattttttgtttttcagcttagctctccaaaccagcctaccactttgcccaccctaccccctgcccagataatgtacactctgcttgctaggtcctctggcctctcagaatgaagatagccaaagaccattgggatttagtaacaagagcattgcattcgaattagaattagtgttctaattctagctctgacgattcacttcaggccactggtaaggtgccatgaaaacactggatgactttaattctggatgactcactttccgttgtgtgaatgagaatggtttacttctaaaaggtatagtgagagataagtaataatatgttaaaaatagtatgcagccctttctgttgccaaggtgacacgtaattgatgagtagaattacctactacaaggcgtgttagaatgcccgttagaatctatgtttctatataatagactcagcagtgagagaaaagatgcccctttaaaacgttaagaaattacgttacgaaaattaaaacagcgaaagggatatgaggttgtttgctggttggttggttgtttggttggttggttggtttgggagtttaaggtttgtcttttattttatggatttgtttttttttctttcatgtttttagaagttcatggaaccagtacagcttgtttgatgctaaaagcagaaaaagaaacttacagaaaattaaatgtcttctgaatatgtccaagaggcacccatgttctccaacaaaatgacacatcatgctcactgcaaggcagcctccctcctcccaaatccctgcatccctgaaccatttgtaatagatattcagaagtcactgaggcatttaccatatsctgcatcccctggcaggttgagttgttgcagaatgagtcagcagtacctgagctcagataggattgagagaatttagagaaaacatacctatggaaagttgaacggctcccatttgggactgactagtaatactttgggtccttaacacagtctgcctctcaatcccatcaaatgcaataggtttaaaatttatgtcttagaaaggggttttgctgctggcaataacttttctcaggctgacattgagaattcaaagcgttagtagcaaatatttttctcttctctccttctgcatcctacccttcttggtttttcaactttgaatttctcattctttaatctctattgagggagtctctagagggtgctgagagtgtctgttggaaagcatgaagatgacaaggctggtttagactggtgcgcaatctagaaagtcaggagactaaaccttctgggagcatgaacccatcagaggtcttgctagagggacaagttagggttaccagaccccaccaccagtatcggttaagggtgactataacaccattgctctggcatcccattgccctgagatgaatcttttaggatattgattatctaaataacaaaaaaaccacaaaacatgttcagcccctgatattaaaggtaaagaagcaccagtgaaagatctcaaaggcacacagtagaagctgtgttctaccctgatggaatcaaagaaaagggagtaactctacgattttgttcttgggcttttcttttatccaaaagcatcattaatgtcaccactctggcttttatcctcctcaggtacgaacctcctgccccaaatccaggcctgtagaagcagctgccgcagcttgtcttccccatttgcatagccttgtctgaaaactagactgctgaatactgaaggatcaggtttctcatcaagaaaactgcattttaaatgaatatcttgtatgtttatagggaagttactaatgtagtataaagagatgcctgtcctccccctcctttctggataagagattttatactttcacaaaacgaaaaattaatgatttgcagtgtagcaaacagtactgttacagtggttagggaaactttcccaaaagcaatctggagtgacatttcattcatgtattcatttaatgactatttattgaatgcctactatgtataaagtattgattctaccctcgaggaagttagtggaaatttttaaatgttagataaataaatagagattgattttcatattcacacacatttaaataaataaaacatagaaaattgtaagaaccataagagatagaatgctgtgggtattcaaagagagaaaatacttcagaaaaaggcgtaattgaggaggtaacatttgatctggtttctaaagggtagctaattactctatctttacaaagtgtgtgaatgtatatgagtgtttataaaatctgggtcaagtttgaatatacagagattgtagggaaggatgttctacacacagggtacagcaagatcaaagttgggagagactgagctatgtacaaagaatagcagtggttttagtttggctggactgtaaagtgcatggaggagaagttgcaaagaagattggaaacctgggtgggaaccacatcacggaagagctggaattcttagctatgaaaatttgtaccatattctgtaaacattttgggagccactgaaggttttagaatgagggaatcataagatcaaagcttgcttgggaagattaacactcttcccagtaaagttttggcaacagcatctgctgttatattgacataatgtgggtaaagtggctgacatagtatctgatgcataggagctcagtaagtcatggaagcagatatactgtagtggtttagagcaaaaactctggtgcctggatgcctgggttcaaaaaccagctctgccacttaatagctgtgtgattttgtacagatttcttaacctctctgtatggcagtttccccatctgtaaaataggattaaaaataatacctgttatgaattattatgagggtcaaatgagttaagacatgtaaaatacatagaacagtgctctattctgaataaagttctcaataaatgttagctgttgtcatcattattatcattctcattcatggaggagataaaatttaagctagcctttaaagaatggctgtgatgtagacatgtagaaaggtaactttcaggcacaagtaagtacacgacaaaaggcatacttgcaagaaaatacgaggtgagtgaggtgaacaatggagagttcagtttgcctatagaataatataggttaaggtgttattggaaaataagattttaaaggtaggccatagtcagattacaaagcactttggatcatagcctaagaatattaagtgttctctaaagacaatggagggacattaaaggtttttgaattaagaagtaactttatcaaaactatatccctaaggaaaattaatttgatggttttgtgtgtgaaggattggagagggaagagacttgaggcagggaaactgattaggaagctattggtgtaatccatgaaggtggtcataagggctagattagagtactgcagtggaagtggagaggaaggaataggagagagattggtggaagactggtaattggaaaggaacaggaaaagggaggaatctgaaagggtgactttcaaattcctcagttttgaacatgggtgactgaaaagatggatatcattaacagagtcagggaatagaagaggtaagatgacaggtttagcatagtcaaaatggagctgtaaatcacagctgacttctcttcacaaattgacatatctgatcctaaaatgtatccagaaattcaacccagaatagcaaaagcaatctcgaaacagaaggacaaagttagaaaactcaaacttctcaactttaaaacttacaacaaaactacagtaatcaaagctgcatcttgctggcatgaggacagacatatagattaatggaagagttcagagtccagaaattaacccccacaattatagtcaattgattttacacaaaggggccaagaccattcaatgggggagaggacagtcttttcaataaatgatgataggacaactggatgtatcaatatacaaaagaataaagttgggccgggcgcggtggctcacgcctgtaatcccagcactttgggaggccgaggcgggcggatcacgaggtcaggagatcgagaccatcccggctaaaacggtgaaaccccgtctctactaaaaatacaaaaaattagccgggcatagtggcgggcgcctgtagtcccagctacttgggaggctgaggcaggagaatggcgtgaacccgggaggcggagcttgcagtgagccgagatcccgccactgcactccagcctgggcgacagagcgagactccgtctcaaaaaaaaaaaaawawataaaataaaataaaaaataaagttggacccttacctcgcaccatatataaaaattaatttaaaatagatcaaagacttaaatgtaagagctaaaactataaaactcttagatgaaaacatagatgtaaattttcatgatgttgaaataggaagtggtctcttggatatgacaccaaaaacataagcaaaaaaagaagaaatagataaattgaatttcgtcaaaatttaaaactttgtgctgcaaaggacactatcaagagagtgcaaagataacccacagaatgggagtagatatttgcaaatcatgtgtctgataagagacatatttagaatattttaagaactcttacaactccatattaaaaagacaacccggtttgaaaatgggcaaagggttgaaatagatattatttcaaagaagatacacaaatatccaataagcacatgaaaagatattcaactttattactaatcagaaaaatgcaaatcaaaaccacagtgagatgctacttcacacccactaagatggttataattaatttaaaatgaaacaaaacaaaaaatagcaagtgttggtgaagatgtggagaaattggaaccttcatacattgctgatggggatgtaaaatggtgtggcccactgtggaaaacagtctagctcttcctcaaatggttaaacatagagttgccacatgacccagcaattctactcctaggtatatatccccaagagaattgaaaatgtgtctacacaaaatttgtacatgtatatctgtagtagtatactatagtggcattattaatatcagccaaaaagtggaaataacatcaactgatgaatggataaaatgtggtctatccatgcaattggatattattcaaccataaaaaggaatgaagtactgatacatgctacaacacaaatgaaccttgaagacagtcacaaaagaaaacattatatgattccactgatatgaaaggtcaaaattagacaaattcatagagacagaaagtatattagtggttgccaggggctgggggttggagagtgttgggaatagatagtgactggtaatgggttcagggtttcttttgaggacaatgaaaatattctaaaattcattgtgatgttgtgtgcacaactctttgaatatgctaaaagccattgaattgtacactttaaatgagggaattgtatagtatatgaagatcaataaacttattttaaaattacttttaaaatatttttttcctggaactgtagcccctgataaccagctgcagattttttagtagaatcaactgtcagttgcttctaagaagtttgaaaaagataacagagaaaaggcttttggatatggtaatcgagaggtctctctacctttaagagagcaatttcaggagagcagtaagatcagatcctggattgcaagaagtatgtataggcggccagtatgtggataagttggacaatgctgagaagaaagggagggatagatgggcgacttttaacttataacctacaggaactgaatcagcaggaattcagggactgaagatgtaagaaaagagctcattggtgatacatgacccttaaagcaacaaaagaggatttagtgctcacagggataaattaagctggaaaggtagaagaaatatgatggaggayattttcaggtagagaaaagaggtaaaggcactcattacacatagcttcaaccagttccgtccagtatgagacagaaaaagtttgatctagaaagatacacaacaaactatgaatcagcagttacctctggggtggaagttgagatggaaatagggagatttttcacttttatttgatagacctttatgttgtatttatgtatgtatgtatgtatgtatgtatgtatgtatgtatgtatgtatgtatgtatttgagactgtgtctcactctgtggcccaggctggagggcagtagtgcgatcttggctcactgcaacctccgcctcccaggttcatgcgattctcctgcctcagcctcccaagtagctgggattacaggtgcccaccaccacgcccagctaattttgtatttttagtagagatgaggtttcatcatgttggccaggctggtctcaaactcctgacctcaagtgatctgcccgcctcggcctcccaaagtgctggattacaggtatgagccaccgtgaccggccatgtttaattttttatatcaagaatgtcctctcattatatttgtatttttcaaaaattagactagctgctgtaagaaatgtaattcttcatcacttggaggtaaagtgaaacgtggccaagctgtagagagtgtgtggcccatattaatcactcaattaatgtttgtagaatttgttgaattgaagttataagcataaactctaatggaagcaattcacttgatttctcagcttcctccagcagaacagagagaaaattctgatggtgtggttcatccaagggtttaaggactgacaaggcaaaaatggcaaaggtgtgagggaactagggtgctaaagtaagttttcaaaatgactaatcatattctccagaataagtaatgaagcacatgaagtcaaaagataggctgagctgggcatgatggctcacgcctgtaatcccagcattttgggaggccaaggtgggaggatcgcttgagcccaggagttcgagtctaggctgggcaacaaaaaaaattaaaaattagctggatgtggtggcctatagtcccagcaacttgggaagctgaggtgggaggactgcttgaacccaggaggtcaaagctgtagtgaaccatgatcatgccactgcactgcagcctgggtgagagactgagaccctgtctcaaaagacaaaaaatttataggatggtgtactttgaaaataggaaaaaaaaaactagggaataggagttacagtaagaataaagaccaaatacaataggaattggaaagatagaaaattgtagatggagaaactagttcagagttcagggccttagaagaagagcaattccaagtgcttctttatcaggccccaaagtgtgtctatgacaaggaataaagtagagtgcaggtggacatcactattgttgaaaagataaaggaactctgatgttagagagttagaacaggcagggggaaaaaataggtctcttgttcaatactgtgaacccattgcccaacgtagtacctataacaggcattcaattaacatttgttgaatgaatgaatgaatgaaatgaatgaatgaatgaatattatagcacttatcacagttacttgttttcctgttttcctcccctagtggaccagaagcttcctgagtattgcttatttctgtgtctctagtatttgaatcaaggtttgagtgagggaatgaatattgaactgcagaaaatgatgacaaggaaaggcagaatgagaaaaattgtgaacgaggtgctaaaacccccaagggaggtgaaagataagaactttcatagtatttgagtaatattatcaaatgacattgactcaaaagagggagcgattgatgagaggaaagaatgttagatttggaagtggcaataggaaaaataatattccaatttttttttccgtcctgggaattctggaggaattggcacagtgttttcttctttgatgctccactcctactctgtcaattagccctcccaatgtttttccaaatttaccttaccttgcttcctgctgccatcatgactagaatgcttcaataccctttttgccaacccctgtggggttgacttcgtcacgttgaccctacatgcaagagcaaaaagctaagttcctaagcataatttttcagcaacattagtacttacctcttacttctccaatggtttccatttgactgtcaaatcaaatgaaaacttccagtcttgaatttaaaagtgttcacaatccagccctctgtaagctgcccttacttcagttgctttgaagtttgcactatgtacaagatgccctacctttctgaaagcttcttatcaaccttttcaatacccatccagagccctctttatcagaactccttgaggactcattttccctacctggctataatcaaaacaactactccagaaacacctgcctgcctttatcctttcctctctcctaaataccaaacactcataaatgttatatgtatatgcttttcttgtgtgtcactctgtattacccgatcaattctaccatataaatttctcccaaatctatctcttcctccttatccttgctgtcactggcctggatggttgcaaaagccctcatcaaccttcagggtatcctacaatagagcttgagtatctttaaaatggaaatctaattatgccttcaaagcacacacacacagatgcacacatgcacccacacaatgtttgagacattttgtaccctttaagcaaaagtccaaactcattagcctgccgggcatatatagcccacgtttacctctctagcctcatcccaccactcccgctgtcaagccttcatgtttctgcatgcatacttccttctccggacttagtcccctaccagtaaccccacaatcatctctgcctccaacttccctatcgtcaccctacatacctataaatttctatacttttaaaaaaacttttattgcacaataatcacagattcacagaaggttgcaaaaaaatgtacagggaagtcccatgtacccttcttccagcctcccccaatgttgacatcttatacaattatattacggcatcaaaatgaagaagttgatattggacattggtacaagccatagagcttatttagatttcaccagctatatatgcacgtgtgtgtgtgtgtgtgtgtgtgtgtgtgtgtgtagctctatgcaattttatcacacatgtagccttgcataactacaaccacaatcaagatacagatcagtaccatcaccacaaggttccctcatgctacgcctttatagctacatccatccctaacccctggcaaccaactaatctattctccacctctgtaattattattttgcaaatgtaatatgaatgggctcatgcagcagataatcttttgagattggccttcttgacccagcacaattcccttgagagccacccagattttttgcatgtatcaatagtttgctcctttttattaatgagcaatattccagtggcatggttgtaccagtttgtttaaccatttatctgttgaaatacatctgggttgtttccaatgtttggctattacaaattgagctgctacgaacattcatgtacaagttcctacacaaaaataagtcttaaattatctgaaatacattgcccaagagtacaattactaggtcatatggtaagtctatttttagtcttaacaggaactgccaaactattttccagagtggctacaccattttacgttcccaccagcaagatatgtttgtgatctagtttctccacatccttaccaggaatcgttgttaccatttttcattttagccatcttgagagttggctcagtgtagttctcatcttttaggacctaagtcaagagttacgtctgtagagcctttttaaaatcctcaggaaaagttgattattccctactctgtgccatttctgacacttcatttgtcgttgtattttaattatttattgacatagtctgtgtctttccctctatttccgggctacatgaagctaggggttgtgtcatattcatctttattcctgcagcatctggtacagttacatgctgggcacacagtggatgctcaggaaaatgtgtggtaagtgagggaaagaatgaatgaacagaacattagtcttgttgcctccccctcctcctccttaagctagaaacctttttagaacagacatcacgccttcctctgtatctcccagcagcagctaatagggtgctctgtacatgtagatgctcaataaatgtcgtctaaactattcagttagcttatcttccctctgcacccaggagataagcatatgaaagagagaataggcccaagtatccttgtattaaggatcatatgtcattatttttataatattcttataatctctatgatcactcaatatttttctgtgtagatgagaaatcaaaacaaaacagtcctttgagtcaaagaatgcctctgtgggtgagcactattcaataatttcaatacccttgttacatatggatttgggagaatggctttttatgtccctgaattctttttgcattttcagaaagatctgggatttttctggtcttgctgcactggtgtaatttgacatgttgattatgaagaggtcattaacctcaacattttttatcactttttgactctggattttctcaactctgatgtatcttaatttacacttgtttatacgtctctgtaagagttattcaggcccttgagggctggtatatattctgtctggaaagtagattgtaagccccttgagagcagggactttataactcctaaaaatgcattctggacactgccagtgttcaattaatgataatactgaaagcttgactaaggtcatctgtcacattgacatcttccttttcatctacaagggttctatcaaaaaaaaaaaaacagctaggttgagtaggtagcactgaatgattctatccaaaattatgctcattgttacactacaatttgttctttagggtgctttcaggtttataattttagatcagttgttacagttaccttccctacaataccctggttacatatgcattagggaggattgcatttcataaccctttagtccttttacataataaaaacttacctgataacatctatgcttgtaaagcatgtaattcttctccccagcccccactgagaaccaggtgattaaactccaagtatggtcctcatcttaaataaccagaaagaacccttaatgactattcaatgtatatcttattttcccagattttaaaatggactaaatgtgtatactgtgtcctatggctgttgaagttaaattaatatgaatatttcaaggaagtctgaattttaaaacagaagggcagatgtgttcattgatgagcgtggaagtagagggaaatttttttgtaagtcaggtttattaaggtatcatttacatgtagtctgattcacctctcttaagtggaaagtttgatgagtttgacaggttgtgtttttttcccttaactatttgctaattcaattatacctccaacttgccctaccaccaccactacccctagaccaaactgacctatattttgtatcctttctattttatatagtgtactaaaggaagtataccaagcctttaatcccaaagcagtggtcttacagctgggagctgacacaatagctggggatcccatgtgctcctttaacatgactccagtgggaattggcaagtgtcttaagtacatccttcaatggcagttggcaacactcattttgggaggaggtgagtataaaggaaggttaccagaatttgttgaccttcctccacattttgtccattggcactgaacttggaaaacttggctttcttgcattggataataccaacctacctgaggcccagaagcctgagtcaataaaatctgccacctccacagttcagaataagaaaatactctgacacacttctcagcttagcatgtgcattgacttcttggcactctaaagtctaaatttcaattcctgaagcaaagatcctctggttaaaggttacctcgaatcttaaaaatagaggatgttaaccccggtagactttgatccaccttctctcagtgtagtctttgattttcagttctaataatcatcttttgggaacatgtcactgaaattccaactctacttgtatgtaagtagtaaacacacagattaattaaataagctgaattcaagaatgcctcttcccccaaaaagcatggatttgttacagtgaagcaaaattgagagatctatagtctcttgggcattcttgcctttggtgtgtgctgattatttgtattacttagccaaaagaaagcccggtctattcaatagtagcatttaaacatttgagaaaagaacttgtcacaacatctaccacctttaaagatgccttgcttaaaatcttctgtctacctacctggcacaatctttatttcattggatgaatagattggtgtgttaaaataacatggtcaagcagattgagcttaaaatgcatatattatagaagagctaattgttggttgttttgtcaacctgttagaggaaattgtggggaggccttattaaatgagtgggcattcaacacaagtacacaagccttgtcctttggcagcctcaaactctagaaggctcaaaattaaaggtacttacaagagacaacctcttatgaaaagctggcaagaaatatattaacttcaactgaagaaaaagataaaattgataagtactgtgtgacatattacttttcttgacagcactaaggatggtgattatgatacaggtacagctaaggagggggaagagacctttctaccatatacatcaggttagaacctgacttttgtttgaggctataatctttacattaaaagcctgttagcattctctaaagcctttttgttttctcagcccaaagttttgacatttgaatatataagtcttcttaggaaatatgtgtattcctgaaaacgcttgtgcataaatggaatttttgcaaatcaaatcatattgtatatgtaccagagatagtttactacctaagcaaaacctatagtgacctttttttgaaattaaatactcatgccgaataagtctatcttataaagtcagatttttccgtgtcaggagtatttaaagtaatacctgtactatctaactgaaattctcagccctattaacacacaattcgtagagggagccacatccccaagcttcagtggaccccattgagacctaaaagacatagtcaaagcatccgtgacctttcaaatagtagaaaagcttaagaaaagagtgaccatatgtccgagtttatacatgttatcccagtgtaatgattaatagtgccctcttttacttttaaaagtataccattttgtatgataatttatatggtcaccctatctaaaatagaccagattctgtttcccttaggctgcgttgagattaggaaatcattccattttacccttatactcttagaatttagctaaaggccaatgttctaatgcttgcatggcagagcacatctattcagcacaaaaatgtgctgattattagccagtataatatggccgttgggtgactgtgacaggacctgacgagatgggtcagagcatccatcaacggtcccttcctcatctcactctctttgatctctgccaccaggcctatgttttgtggcaaaaaggaatgctgacatcaaaagaaggaagtctgtttttgtcagcattttccttttctctttcctgggtttttagggctagatctgccaatagttttaaaaatacaaatcacattcagcagtcattttatagaattgttgcaaaattcatcacagaaatctttccattgggtagatcacctcaagagatctggattccagagatctgagtcttgctgatggctcttgatggaactgaggagtttggattcctcaggtacatatttttggggagatgggagcctatttaatctttgcagaccttggactgcccagttttacactgtgcatgatttgactggtccaccaaagtctgcctactaggtggtttaaaaatatcacaaaggggggattaggggaaattctgcaatttgaggttgtcttttcttaaaacatttttctctctttccttaccccccttccctctcctgctgttttatgactattctttcctaacttcacaattcttgatggagacaggaggctataaccttgccaacacggctcgatgctggacatacttgaccggggtcatcctagggaaaacactatcctctgagatcccagatcatgaggtaagtaaggctctgacaagtcctctcttctttaaggggaagagctgagtcattccacctaatcaaaatcacgtcctcaccactcaataccgttttgttgagagacacttcaataacaataacacactgtcttggcagaatagtggactcttgttccaaaatatccaagaccttctgcctttttgtttttttacaagagatctcaaaggccaaccaactttaatttctcaattaattacagagactgtgggaaggggtcacctgttcacacaaagaattctttggaatatgtgcatatttttatcccctagcctcaaaaaggaaggggctatttttaaaatgtgtaagctggattctcatcttttttttaagaagtttcataggtggtacgtggcacatgttctttggtggtagtcctgatctctcaattttctttgactaatgtaaaattcaagaaacccacaagcactacaaagaccattgctgatgtttttctagcaattagtggcacacagaggctggaataggaccatccaaaatgtgaaacgtcatttgagcccttgccattttctttagtcatacaagatgggctttatgttttccaaagcaaagatgtctgttctagttttcccaaaacaagttcatggaaagctgtctgggacctgtgagtgtgctgataatccctaatccaaaggcatacctttgttcctacctatcaccccagttcccctgcaagtaggaaccatgttatagatcaagatgtataactacggaccttagactagatgacttaaaataacaaaccagtacatgcagccccaccttctcaagctatttcccaaggattagggatgctgctttggttttaatgttatgatttctgccagatacagtagctgtacacttgggagcatgatgctttttaaagttgctattattttttaaaaattagaaacaacttaaactaatttccttccaattttctcctaacctcaggtgaggtacaatatgtatctcacaaaaaccattcaatatgtctagaatacaaatagaaggtacactataatttgagacaatttgctgatgtcagggttaatagaagtctcttttcttggtttgtcttacctttattcagtatttggaagcttaatgaaatataaaggtaagtgctgtgaacaaatgtaatcgctgttattgctgtgggaatatctcagattgcattgtaatttaaagctctgggactttataaactgatcaagttatgtcagaaacaagttttaagctgtagaagcctgaactgagaatgaatgctctattcctgagaagcaaaagcaaatccaaagtttcatctgtgttaaaagattgataaaattttaataaagatgaatatcgcctctggtacatggagaagctgtgggcctgaatgggtgtaagctgggcctcataaataggtgttctgtctttatactgaaatattctgtaagattaaatgagatataatgtatgtcaagtgcctaacacgtagttccctggaatctaataggcactttaaaaatgcaagttctcggccgggcatggtggcttacagctgtaatcccagcactttgggaggtcaaggcaggcagatcacttgaggtcaggagtttgagaccagcctggccaacatggtgaaagcccatctctactaaagatacaaaaaattagctgggcgtggtggtgcacgcctgtaatcccagctactcgggaggctgaggcaagcgaattgcttgaacccggaaggtggaggttgcagagagccaagatcatgccattgcactccagcctaggtgacagtgtgacactccgtctcaaaaaaaagaaaaaaaaatgcaagttatctccttcttctttgcatgctgctcacttcttatacccagacatttatgactatgtcattcataaatttgtccaaaccttttgtgaattccttctgtcatatccttctggtttaagagatgtgagtcatgcaagaaagaacaaagaataaaattgaaatgacagtcttacaggtacaataagataacattttaatgaaaattgccaaaactaggctacacagtgtgaagtcatataagttctgtggcacaatacacagttgcacacaaatatccttgtggtcctctgaaatcagattaacaaatggtagatcaaaaaatatttgctgagcacccattatgtgccagacaccatgctaaatgtcttaggagatgcaaagagagaaattcatcccctacctcaagcagctagggagggagggtggtgtaagtgctggggagacatgcaaatgcacagatagttataatacagagcagaaaaagaataagacagtaggaagagtgactgtggagatgtgcatcaaatataaaggggatacaaaggagtacataaaataccctgccctccatgagctgaaaatataatcaagaaatctagtaggtgaaaaggtcaagataatgcagtggtcagttgcagccgggctgacctcactctcttcgctctcagtcttgggctttagttctttcatctcctagggtaataatcctcctcctccaaatgcccgttccctacttctctattatcttcctaggtccagcttcaagtcctgtgcccttcaaaaacccttacctaaatacatcaatcccctttgagctcttccttcacgttcatttattccttgtttcatttaacaattatgtgttgggcccctactatttgccaggccttattgagacctggattcagagatacaaagactaatgagataatcccagtgccctccaaaatctcacgatctaataaaggtgacagaacaatgtgctcacatccaggacagatgaggaccataggggatatgtttcaacaagactttgaactgactcttagaggctgattaggagttcgctaggtgaagaagaagaaaaaggcattctaggcagagggaacaaagatcagaaagggactggtgcctcatgggaccagtgaaaaatttgctatgtgtagattacagggtatatgagagacagtaggaaggattaaggcttgaatggaagttaaggccagattatgaagagccctgaatgctacattaaagagcttacacttttttctgtgaaaacaaatgagctttaacttttaaaaagctcagttggtagagatagattgcaaagaggagagacttgagaaacgcagacctgttaagagattcaaatatatacctataacacttacagtctgtgccattcatttggtcatcattgttttggttgtctgcaccacgcccccaaccctagtgcttagctgagtgttaagtagccaccacctagttgaataaatgagtgtttgagtaagtgtctcaatattcatattgggaaacttctatttttttaagatgaaagaattggaagcgtaatctagcctttctctgggaacccaatttaaccttaatagcaactttccatcctttgcaagaggtatcaggtagcccagctataggaaacaggtgtatccatgggagaacattatattaccaatgcagggaatggagttcagaaggcagaagcccagcacaaatattagaagtgataagggtaggacttcaagtatagcgctcataaaatataaaaccggtgataccataaagccagtgatgccataaggccagtgatggcataaagccagtgatgaggaagttagtttcagccagagcactggggagccaggttggccagccaagcagtcccagctgggaaagctgagaagaatggagcttgtatgtatgattggcccagatatctctaccatagggaaagcccaaaggtgtcatggtaccatgaaaagaccagtacatggcaaatttagcacaatcacatggattattatgtataaaaatgttctatagtccagtactactatttagatcccgtgacttatctaggatagagtagggctggggtgtgtgtgtgtgtgtgtgtatgtatatgtgtatcatcacataggtttactaatggaaaatattaacactacttaaccagactgctttttatggactgattaaactgtacctcattcatattagggaacatatgtagccattaaaaagaattaggtcaatttatatacaagtatatgttactaataaaaaaacagccttcttgcactgtaacctgtagatggcactgaatctatagattgatttgtgcaggagtaacatcataacaatatttaatcttttaagccatgaatttatctttctatttacttgagtcttctttaattccaaattataatctgtactctccagtaaacacatcttacacaaatattattgaatttatccctaagtactgtatttcattattttgatcctatgtaaatggtattttcatttcaatttccaatagtttgttgccagaatattgaaggacaattgacttttcatattgatcttgaataatgtaaccttgctaaatttacttattagctctagtaacttttttgtagattgcttagcataatccatgtatgcaaacatcatctgtgaataaagagaattttctttctgtataatcttcatgtcttttatttctttttctcacctttttcactggttgggacctccagtgcaatgctgagtggaaatggtgtgtgaatatctttatctggtccccagtcacagggggaaagtgcttaatcttcactatgaagtgtgatattagctgtaggatttttcaaaaatgttcttttttaggttgaggaagttcccttctattcctaatttactgagacttttttttttctcacaaatgagtactgattttgtcaaatgtttttcttcatctattgaaatgatcatatggtatcctcctttattgttagtacagtaaattgcactgattttttaatgttaaactgactttgcattcctggaataaaccctgcttggtcatgttatattatcctttttatgtattgctggattcattttgctgaaacttggtcaaggtttttttgtgtctatgttgataagggatgttggcctgttgttttcttttcttgtagtgtctttgtctggttttgatatcagggcaatgctgatctttggtttctctggggtttacatctgggcatctgtttgtttttgtttttgtttcgttttttgttttttgtgagacagaatcttgctgtgtcgcccaggctggagtgcagtggtgcaatcttggctcactgcaacctccgcctctcgggttcacgcgattttcctgcctcagcctccccagtagctgagactataggcgcgcaccaccacacccggctaatttttgtatttttagtagagatgaggtttcaccatgttggtcaaactggtcttgaactcctgacctcaagtaattcgcctgccttggcctcccaaagtgctgggattacaggtgtgagccaccatgcccagcctatagtatgcatttttaacttattagagtcaacttttaaatagtattacattacttcacatataatatagtacctttacagcagcgttcttccatttttttcctttctctttctttgtgctattgtagtcatatattttacttttgcatatgttataaacctcttgatacattgttattgttttgctttgaacaatttttttagtttttaaaatatttactaattcattttaagtagaataaatccagcatatattagcacaaataacatgttttgatgaaaaataactgtattttcaaagataaaaagaaatttcttaagaaaaatgtcattgttatacccttttgcccatttctttaacatctggcttaatagaagacagctgacttctcatacctgcttctacattcagtgtgttttgagatgttgtttttttaaaaatatataaagaaaatccagcttcacatagatatgtaattggaaaagggaaaatgtattttaatacactttcagataattatggatattcttcgatactacactaaaacttcacaaatgaaagtttcttaaaggttaatccagtgtggaatctgaaaccgtatcagtgaactttttatgtactattacattaaaactcattggtcatcttattctttgagtggatatttgacccatcttatacatattggttatttggaaaatattagttcactaagttatgcaaatattccaaatgctaacacattttatgcagtatcaaaaaatcagtcattgatctcaccaccgatctcactggaaaaaaagcttaagtattgagaagctgttatgctcccagtggcagaatgaagtttcctaaaattctaattttcactcaaaaaatgtgaatattatcattggcaagaaatgctgtcagttgtttgccctgaagtgacaaacttatttcatttttgagaaaatatttgccaaatgtccaagtatttaatcatgccttatccatcattctttcaagcaaaaatgatgttctatgaaaaatgtggctagttaagctcaaaacttgacatgcttttcctcaagacaaccaccatagcacagtttataccagaagcaccttacgtatacctccaatttcatcacacagaatattaaatccagcatcaggatttaataaaattaatactttttagtgctttatcagggacattcttaggtcaaattggattttattttactataagtgcatgtcagtaaataatacaataactgctggtatactttggtgctattgccttaatttgtaccatagtatctgcagttttacccaccattgcttttgcacctccatgcaaatataaacaaagttgctccagcataaaccatgagattcaaagttattcagcactttgaacattttagcactactcatgtttgttgccaaccattcacataaaagaagatcgtcttcaaagattagttagtgctgataccacatgactgactacaagcaaaactgtaagcccagccatatttgtagatttgtctgtttgtaaggtgcgaataaattctgtaaatgagatgctaactaagtcttcatgattacagctaaatgtttaaataaacaagttactgtgccattgagaaaagacaatgctgtaagctattttactaacttttcatccaataggcagtgagcaatgtcaattgtccaaggctttattggtctccaagctataatgtggaattctctagccaatgcagtaaaataacttacctataacatgctgcaatgactttttaatttctagtttgaaaaggtgcaacaaacaattcttggctatttgagttcatcatgtctacacttaatatattcaattccttttcccttaactatgaatgaatggtctaaaaatgatgctacaatttaaatgacgaattattttgaaactgttcaaaaatgttctgttgcataagacactataaggtaaattcgttacatatataaagataattttaatcatatttcatttcttatttacaatttcacccagtttttttaagtaaagttcttccttccatgggtcagaacccttactgatgtttcagtttcatctttttcagctctataaacatagatgttgtggccctggtttgagaaagcaagtcttttagctctggacaacaccccttatatccctaattgggctgtgtttggctggaccgtgttactccatttcctgtctgccaccagggtaacagcatgctttgctcctctctggccttcggtggcagtcctttgagctcagtacataggcagccaccactggatctgctgattccaacatgaccctacatggtcttctaaagaaattatgagtaagaaaatatcttttatattcatccattccagcatttttcaatattttgtgtagatccaggtttccatctggcacaaactgcattctgcctaggaacttcagttcatttttcttataccgtaggtctgctagcaacaaattctcagcttttgtttgtctgaaaaagtttctattttgtcttaattctggaaagatattttcactaggtgtagaattctaggttgataatttttcttttagcacttcaaagatattatttcattgccttcttgcttacatatttcctcatgagaagtctgtgataaattttcatctttgttcccttgtataatatgtgtcatatttctttggctgctaagttttctctttataactagttttcggcagctggattctaatatgctgtcatgtggttgtctttggatttatcctgtctgagatgcattgagctaggatctgtgggtttatagtttttatcaaatttggaaatatttcaaccactatttttttctgttacttctttctttcttctacttctaagactccagctaaacctagttagaccagttatgttgaagtttcatgcatcattcactgtgacctttttactttttctttctttttctttctttctttctttctttctttctttctttctttctttctttctttctttctctttatttttaagagacagagtcttactccgtcagccaggcttgagcgcagtggtatagtcatagcttactgcagcctcaacttcytgggctcaagcgatcctcccacctcaccctcccaggtaaataggactacaggtgcactccaccatgcctggttaattgttttattttgtagagacaagctctcactgtgttgcccaggctgttgtccaggctgatctgccactcctgggctcaagcaatcttcttgcctcagcctcccaaagtgctggaattatgggcatgagccaccatgcccggcctattttttttttttttcagtcttttatttctccctgtgatgtattttgaagagtttccattgctttgccttcaagttcattgatcttttattctgcagtacacctgctcttaatctcatccagtgaaatttccatttcaaatattgtgtttttcatctctagaatttccattcttaaaaatatttttaatttctctcctcactaggttcatattttttttacctccttaagcatatggagcatatttataatagctgttttagagtccttgtctactaactccatcatttctgtcatttctgggtctgtttctgttaactgatttttcttcagattataggtcacatttgcctacttctttgcatgtttagtaattttttattggatatcaaatgtcatgacttttatattgttgaattctggattttaaataattggatttcaagaggattatacttttttcctgataattaagttattgtggatcagtttgatccttttccagttttgttttgaaattaatttagagtaggtcttgactagcctttttattctagggctaatttagcctgctttgaatgtactacccctgtgaagcctatactgttaccccaggtattcagtgagatctcttcaatttggccctttgtgagctctagaaattgttcttctttttttgtttggttggtttttgtttgtttgtttgtttaagatggagtcttgctctgtcacccaggctggagtacagtggcatgatctcagctcactgcaacctccgcctcccaggtgcaagcaattctcctgcctcagcttccccagtagctgggattacagacatgtgccaccatgcccagctaatttttgtatttttagtagagacggggtttcgccatgttggccaggctggtctcgaactcctgacctcaagtgatccgccagcctcagcctcccaaagtgctgggattacaggcatgagccacggcacccagccaggaattgttcatcttacaacaccacaataattgtttttctgtaagtttttcaggactactcttgtgaagttgtaccctatacatgttcagactggtattcttcaaaagactcaagtagacttctacgtatatttctagtattctttttttggcttagctccatctctacaatttctaaccaccttggcctctctgaactccaatatccatctcctctactcagtgagattgctgggctctgtttggattcccccttcctacaccacagtccagggattacttccaggtagaaagcctgggtgaaagtagggttcacctcattcgtatcctctgtctttcargaatcagtatcttgtactgtttattgtccaatttctgaaaatagatgtttcctgtaatttgttaattttccagttgtctctagagagaaagtaatctcgccctcatggccagaagccgaagtcctttagttatctgccttcattttctctgccttcatttttgaagaatatttttgtaggatttaaattctacatttacagtttttcttttcttctggcttctgttgtttctgatggatattagtcttattattattgtttccctgtatataatgtatcttttcccctctggctacctttataaatttatatttggtattcaaacctttactgtgggctaggcacggtggcccatgcctgtaatcccaacactttgggaagctaaggcaggcagatcacttgaagccaggagtttgagaccagcctggccaacatggtgaaaccccatctctactaaaagtacaaaaagaagcccggtgtggtggcacatgcctgtaatcccagctactcgggtggctgagtcatgagaatcacttgaacctgggaggcagagtatgcagtaagctgagatcacaccactgcactccagcctgggcaacaatgcaagactctgtctcaaaaggaaaaaaaaaaaaacagagagaaagaacatcgactgtaatatgcctcagtgtacatttgtttgtatttatcctatgtgggattccctaacttcttggatttgtgggttgctaatttttatatacaggttgggtatcacttttttaaaacacttgggaccagaaatgttttggatttcagattttttttcagattttgtaatatttgcaatctggaaattcaaaatctaaaatgctccagtgaacatttcctttgaacatcatatcaggactcaaaaagtttcatattttagaacatttcagattttggattttcagattagggatactcaacctgtgatttggaaaaagtatcagccagtatttctttattttttttttaacttattctccctttcctgttcttctgggactctaattacaaatatgtttgattgatgctgtcctacaagacactgaagtgagcttactatttttttcagtttttttctctccaggctacagtttgtttgatttctattgatcagtcttcaagtttactgattccttagtatacaatctactattcattccatccaatgaattttttttatttcatctcatccaatgatttccttagcttcttttttcttgaaaagattatagattcacagaccattgtaaaggtactacaaagaggtaccatgtactcttcactcagttccccccagtggtaacttcttacatgactatactgcagtaaaaaaaccaggaaattgacattggtacagcagaccttatttaaatttgaccagttttacatgagcccatttgtgtgtgcctgtgtgtgcataggcaattttattatatgtatagattgatgtaactactaccgtcgtcaggatacagcgctgttccattatcacagagaccttccttgtgctacccttttatagccactgctgccttcttttcccctactccatcacgaacccttggcaatcactgacctttcttcatctctatgactttttcatttagacaatgtgatataagtggaatgatacattatgtgagttgttgagattggattttgccctcaggataattcccttgagatccatccaatttgttccatacattaatagttcattcctttttatggatgaatggtattccatggtatagatgtaccataggttgtttaatcatttctccatttgagttgtttccaattttggctattaaaattaaacacttatatacagtttttgtgtggatataagttttcatatctctgggaacaatgcctaggaatgcaaatgctatatcatattgtaagaataggtgtgttgtttttaagaaactaaacagaaaggaaatgactaaagaaaagaagtgctttcttttaattactgtttacataccttatcttttccatccctttaaaaaatgtccctatatcattacatttgaagtgagtttcttgtagacaggatataattggattgtgtttttttttaacctattctgccatctctgtctttccaatggtgtgtttaggcgatttacttttaatgtagttattgatatgttagggcttaagtctgccattttatttaaacagtatgttttctgtttgttccctctaattttttttttatactttaagttctgggagacatgcagaacgtgcaggttggttacataggtgtacacgtgccatggtggttgccgcacccatcaactcatcatctacattaggtatttctcctaatgctctccctcccctaggcccccaaccccaacaggacccagtgtgtgatgttcccctccctgtgtccatgtgttctcattgttcaactcccacttatgactgagaacatgcggtgtttggtttctgttcctatgttagttttctgagaatgatggtttccagcttcatccatgtccctgcaaaggacatgaactcatccttttttatggctgcatagtattccatggggtatatgtgccacattttctttatccagtctatcattgatgggcatttgcactggttccaagactttcctattgtgaatagtactgcaataaacatctacaaacctatgtgttcatgtgtctttatagtagaatgatttataatcctttgggtatatacccagtaatgggactgctgggtcaaatggtatttctggttctagatccttgaggaatcaccacactgtcttccacaatggttgaacactcccaccaacagtgtgaaaacgttcctatttctccacatcctctccagcatctgttgtttcctgactttttaatgatcgccattctaactggtgtgagatggtacctcattgtggttttgatttgcatttctctaatgaacagtgatgatgagctttttctcatgtttgctggccacataaatgtcttctttagagaagtgtcggttcatatccttcacctactttttgatgtttgttttttccttgtaaatttgtttaagttccttgtagattctagatattagccttttatcagatggatagattgcaaaaattttctcccattctgtaacttgtctgttcactctgatgatagtttctcttgctgtgcagaagctctttagtttaattagatcccatttgtcacttttggcttttgttgccattgcttttggtattttagtcatgaagtctttgcccatgcctatgtcctgaatggtattgcctaggttttcttctagagtttttatgattttaggtcttatgtttaagtctttaatgcatcttgagttaatttttgtatcaggtgtaacaaaggggtccagtttcagttttctgcatatggctagccagttttcccaacaccatttattaaatagggaatctttccccattgcttgtttttgtcaggtttgtcaaaaatcagagggttgtagatatgcagcattatttctgaggcctctgttctgttccattggtctgtatatctgttttggtaccagtaccatgctgttttggttactgtagccttgtagtattgtttgaagtcaggtagtgtaatgcctccagctttgttctttttgcttaggattgtcttggctataagggctcttttttggttccatatgaaatttaaagtagttttttctaattctgtgaagaaagtcaatagtagcttgacagggatagcattgaatctataaattactttgggcagtatggccattttcacaatattgatccttcctatccatgaacatggaatgtttttccatttgtttgtgtcctctcttatttccttgagcagtggtttgtagttctccttgaagaggtcctccacatcccttgtaagttgtattcctaggtattttattctctttgtagcaattgtgaatgggagttcactcatgatttggctctctgtctgttgttgatgtataggaatgcttgtgaattttgcacattgattttgtatcctgagactttgctgaagttgcttatcagctgaaggagatttggggctgagatgatggggttttctaaatatacaatcatgtcttctgaaaacagagacaatttgacttcctctcttcctatttgaataccctttatttctttctcttgcctgattgccctggccagaaattccaatactgtattgaataggagtggtgagagagggcatccttgtcttgtgccagttttcaaagggaatgcttccagcttttgcccattcaatatgatattggctgtcggtttgtcataaatagctcttattattttgagatatgttccatcaatatctagtttatcgagagttcttagcatgaaggggtgttgaattttatcagaggccttttctgcatctattgagataatcatgtggtttttgtcgttggttctgtttatgtgatggattacgtttattgatttgcctatgctgaaccagcgttgcatcccagggatgaaggcaacttgatttggtggataagctttttgatgtgctgctgaatttggtttgccagtattttattgagcatttttgcatagatgttcatcagggatattggcctgaaattttctttttttctgtgtctctaccaggttttggtatcaggatgatgctggcctcataaaatgagttagggcagagtccctctttttctattgtttggaatagtttcagaaggaatggtaccagctcctctttgtacctctggtagaattcggctatgaatccatctggtcttggactgtttttgttggtaggctattaattactgtctcaatttcagaacttgttattggtctattcagggattcgatttcttcctggttttctcttgggagggtgtatgtgtccaggaatttatccattttttttctagattttctaatttattcgtgtagaggtgtttatattattctctgatggtagtttgtatttctgtgggatcagtggtgatatcccctttatcattttttattgtgtctatttgattctcctctcttttcctctttattagtctcttttttattaaactttaagttttagggtacatgtgcacaatgtgcaagttagttacatatgtatacacgtgccatgctggtgtgctgcactcattaactcgtcatttagcattaggtatatctcctaatgctatccctcccccgttcccccaccccgcaacagtccccagagtgtgatgttccccttcctgtgtccacgtgttctcattgttcaattcccacctatgagtgagaacatgcagtgtttggttttttgtccttgcgatagtttactgagaatgatgatttccaatttcatccatgtccctacaaaggacatgaactcatcattttttatggctgcatagtattccatggtgtatatgtgccacattttcttaatccagtctatcattgttgaacatttgggttggttccaagcctttgctattgtgaatattgccacaataaacatacgtgtgcgtgtgtctttatagcagcatgatttatagtcctttgggtatatacccagtaatgggatggctgggtcaaatggtatttctagttctacatccctggggaatcaccacactgacttccacaagggttgaactagtttacagtcccaccaacagtgtaaaagtgttcctatttctccacatcctctccagcacctgttgtttcctgactttctaatgatcgccattctaactggtgtgagattgtatctcattgtggttttgatttgcatttctctgatggccagtgatggtgagcattttttcatgtgttttttggctgcataaatgtcttcttttgagaagtgtctgttcatatccttcacccactttttgatggggttgtttatttttttcttgtaaatttgtttgagttcattgtagattctggatattagccctttgtcagatgagcaggttgtgaaaattttctcccattttgtaggttgactgttcactctgatggtagtttctttttgctgtgcagaagctctttagtttaattagatcccatttatcaattttggcttttgttgccattgcttttggtgttttagacatgaagtccttgcccatgcctatgtcctgaatggtaatgcctaggttttcctctagggtttttatggttttagctctaacatttaagtctttaatccatcttgaattaatttttgtataaggtgtaaggaagggatccagtttcagctttctacatatggttagccagtttttccagcaccatttattaaatagggaatcctttccccattgcttgtttttgtcaggtttgtcaaagatcagatagttgtagatatgcggcattatttctaagggctctgttctgttccattgatctatatctctgttttggtaccagtaccatgctgttttggttactgtagccttgtagtatagtttgaagtcaggtagcgtgatgcctccagctttgttcttttggcttaggattgacttggtgatgcgggctcttttttggttccatatgaactttaaagtagttttttccaattctgtgaggaaagtcattggtagcttgatggggatggcattgaatctgtaaattaccttgggcagtatggccattttcacaatattgattcttcctacccatgagcatggaatgttcttccatttgtttgtatcctcttttatttcattgagcagtggtttgtagttctccttgaagaggtccttcacgtcccttgtaagttggattcctaggtattttattctctttgaagcaattgtgaatgggagttcactcatgatttggctctctgtctgttattggtgtataagaatgcttgtgatttttgcacattgattttgtatcctgagactttgctgaagttgcttatcagctgaaggagattttgggctgagacaatggggttttctagatatacaatcatgtcatctgcaaacagggacaatttgacttcctcttttcctaattgaataccctttatttccttctcctgcctaattgccctggccagaacttccaacactatgttgaataggagtggtgagagagggcatccctgtcttgtgccagttttcaaagggaatgcttccagtttttgcccattcagtatgatattggctgtgggtttgtcatagatagctcttattattttgagatacgtcccatcaatacctaatttattgagagtttttagcatgaagggtgttgaattatgtcaaaggccttttctgcatctattgagataatcatgtggtttttgtctttggttctgtttatatgctggattacatttattgatttatgtatattgaaccagtgttgcatcccagggatgaagcccacttgatcatggtggataagctttttgatgtgctgctggattcggtttgccggtattttattgaggatttttgcatcaatgttcatcaaggatattggtctaaaattctcttttttggttgtgtctctgcccggctttggtatcaggatgatgctggcctcataaaatgagttagggaggattccctctttttctattgattggaatagtttcagaaggaatggtaccagctcctccttgtacctctggtggaattcagctgtgaatccatctggtcctggactctttttggttggtaagctattgattattgccacaatttcagagcctcttattggtctattcagagattcaacttcttcctggtttagtcttgggagggtgtatgtgtcgaggaatttatccatttcttctagattttctagtttatttgcatagaggtgtttgtagtattctctgatggtagtttgtatttctgtgtgatcggtggtgatatcccctttatcattttttattgcatctatttgattcttctctcttttcttctttattagtcttgctagcggtctatcaattttgttgatcctttcaaaaaaccagctcctggattcattaattttttgaagggttttttgtgtctgtatttccttcagttctgctctgattttagttatttcttgccttctgctagcttttgaatgtgtttgctcttgcttttctagttcttttaattgtgatgttagggtgtcaattttggatctttcctactttctcttgtgggcatttagtgctataaatttccctctacacactgctttgaatgtgtcccagagattctggtatgttgtgtctctgttctccttggtttcaaagaacatctttatttctgccttcatttcgttatgtacccagtagtcattcaggagcaggttgttcagtttccatgtagttgagcggttttgagtgagtttcttaatcctgagttctagtttgattgcattgtggtctgagagacagtttgttataatttctgttcttttacatttgctgaggagagctttacttccaactatgtggtcaattttggaataggtgtggtgtggtgctgaaaaaaatgtatattctgttgatttggggtggagagttctgtagatgtctattaggtgtgcttggtggagagctgagttcattcctgggtatccttgttaactttctgtctcgctgatctgtctaatgttgacagtggggtgttaaagtctcccattattattgtgtgggagtctaagtctctttgtaggtcactcaggacttgctttatgaatctgggtgctcctgtattgggtgcatatatatttaggatagttagctcttcttgttgaattgatccctttaccattatgtaatggccttctttgtctcttttgatctttgttggtttaaagtctgtttgatcagagactaggattgcaacccctgcctttttttgttttccatttgcttggtagatcttcctccatccttttattttgagcctatgtgtgtctctgcatgtaagatgggtttcctgaatacagcacactgatgggtcttgattctttatccaatttgccagtctgtgtcttttaattggagcattgagtccatttacatttaaagttaatattgttatgtgtgaatttgatcctgtcattatgatgttagctggttattttgctcgttagttgatgcagtttcttcctagccttgatgatctttacaatttggcatgatttcgcagtagctggcaccagttgttcttttccatgtttagtgcttccttcaggagctcttttagggcaggcctggtggtgataaaatctctcagcatttgcttgtctgtaaaggattttgtttctccttcacttatgaagcttagtttggctggatatgaaattctgggttgaaaattcttttctttaagaatgttgaatgttggcccctactctcttctggcttgtagagtttctgccgagagatccgctgttagtctgatgggcttccctttgtgggtaacccgacctttctctctggctgcccttaacattttttccttcatttcaactttggtgaatctgacaattacgtgtcttggagttgctcttctcgaggagcatctttgtggtgttctctgtatttcctgaatctgaatgttggcctgccttactagattggggaagttctcctggataatatcctgaagagtgttttccaacttggttccattctccccgtcactttcaggtacaccaatcagacgtagatttggtcttttcacatagtcccatatttcttggaggcttttttcatttctttttattcttttttctctaaacttcccttctcacttcatttcattcatttgatcttccatcactgataccctttcttccagttgatcgcatcggctcctgaggcttctgcattcttcacatagttctcgagccttggctttcagctccatcagctcctttaaacacttctctgtattggttattctagttatacattcgtctaaatttttttcaaagtttttaacttctttgcctttggtttgaatttcctcctgtagctgggagtagtttgatcgtctgaagccttcttctctcaactcttcaaagtcattctccatccagctttgttcctttgctggtgagaaactgtgttcctttggaggaggagaggcactctgctttttagagtttccagtttttctgttgttttttccccatctttgtggttttatctacttttggtctttgatgatggtgatgtaaagatgggtttttggtgtggatgtcctttctgtttgttagttttcctcctaacagacaggaccctcagctgcaggtctgttggagtttgctagaggtccactccagaccctgtttgcctgggtaccagcagcggtggctgcagaagagtggattttcgtgaaccacgaatgctgctgtctgatcgttcctctggaagttttgtctcagaggagtacccggccgtgtgaggtgtcagtctgcccctacttggaggtccctcccagttaggctgctcgggtgtcaggggtcagggacccacttgaggaggcagtctgcctgttctcagatctccagctgcatgctgggagaaccactgctctcttcaaagctgtcacacagggacatttaagtctgcagaggttactgctatctttttgtttgtctgtgccctgcccccggaggtggagcctacagaggcaggcaggcctccttgagctgtggtgggctccacccagttcgagcttcccgactgctttgtttacctaagcaagcctgggcaatggcgggcgcccctccctcagcctcgctgccgccttgcagtttgaactcagactgctgtgctagcgatcagcaagactccgtgggcgtaggacccccccaagccakgtgcgggatataatgtcctggtgcgccgttttttaagcccatcggaaaagcgcagtattagggtgggaatgacccgattttccaggtgctgtctgtcacccctttctttgagtaggaaagggaactccctgaccccttgtgcttcccaagtgaggcaatgcctcgccctgcttcggctcacgcacagtgtgcttcacccactgtcctgtgcccactgtctggcactccctagtgagatggacccggtacctcagatagaaatgcagaaatcacccgtcttctgcgtcgctcacgctctttattagtcttgctagcggtatatctattttgttgatttttcaaaaaaccagctcatggattcattgatttttttttgaagggttttttgtgtctctatctccttcagttctgctctgatcttagttatttcttgtcttctgctagcttttgaatttgtttactcttgcttctctagttgttttaattgtgatgttagggtgtcgattttagatctctcctgctttctgttgtgggcacttagtgctataaatttccctctaaacactgctttagctgtgtcccagagattctggtacattgtatctttgttctcattggtttcaaagaccttatttatttctgccttcattttgttatgtacccagtagtcattcaggagcaggttgttcagtttccatgtagttgtgtggtattgagtgagtttcttaatcctgagttgtaatttgattgtgctgtagtctgagagactgtttgttatgatttccgttcttttgcatttgctgaggagtgttttacttccaattatgtggtcaattttggaataagtgcaatgtggtgctgagaagaatgtgtattctgttgatttgtggtggagagctctgtagatgtctattagatccacttggtccagagttgagttcaagtcctgaatatccttgttaattttctgtcttgttgatctgtctaatactgacagtggggtgttaaagtctcccacttttattgtgtgggagtctaaatctctttktaggtctctaagaacttgctttatgaatctgggtgctcctgtattgggtgcacatatatttaggatagttagctcttctttttgcattgatccctttaccattatgtaatgcccttctttgtctttttagattgttgttggtttaaagtctgttttatcagagactaggattgcaacccctgctttttttttttttttttttgctttccatttgcttgtaaatattcatccatccctttattttgagcctatgtgtgtctttgcacgtgagatgggcctcctgaatacagcacaccaatgggtcttgactctttatccagtttgccagtctttgtcttttaattggggcatttagcccacttacatttaaagttaatattgttatgtgtgaatttgatcctgtcattatgatgctagctggttattgtgaccattaattgatgcagtttgttcatagtatcaatggtctttacaatttggtatgtttttgcagtggctggtactggttttttctttccatatttagtgcttccttcaggagctcttgtaaggcatgcctggtggtgacaaaatctctcagcatttgcctgtccataagggattttatttctcctttgcttatgaaccttagtttggctggatatgaaattctgggttgaaaattcttttctttaagaatgttgaatattggcccccactctcttctggcttgtagagttttgcagagaggtctgctgttagtctgatgggcttccctttgtgggtaacccgacctttctctctggctgcccttaacaatttttccttcatttcaatcttggtgaatctaacaattatgtgtcttggggttgctcttctcgaggagtatctttgtggtgttctctgtatttcctgaatttgaatgttggcctgtcttgctatgttggggaagttctcctggataatatcctgaaaagtgttttccaacttggttccattctccctgtcactttcaggtacaccaaacaaacatagatttggtcttttcacatagtcctttatttcttggaggctttgttgattccttttcaatcttttttctctaatcttgtcttcacacttcatttcattaagttgatcttcaatctctgatatcctgtcttccacttgatccgttcagctattgatacttgtgtatgcttcacgaaattctcgtgctgtgtttttcagctccatcaggtcatttatgttcttctctaaactggttattctagttagcaattcctctaacctgttttcagggttcttagcttccttgcattgggttagaacatgctcctttagcttggaggagtttgttattacccaccttctgaagcctacttttgtcaattcatcaaactcattcttgtgatcctttggaggagaagaggcattctggttttttgaattctcagcctttttacactggtttttcctcatcttcgttgatttatctacctttggtctttgatgttggtgacctttggatggggtttatgtgtggacgtcctttttgttggtgttggtgctattcctttctgtttgttagttttccttctaacagtcaggcctctctgctgcaggtgtgctggagtttgctggaggtccactccagacgctgtttgcctgggtatcaccagcggaggctgcaaaacagcaaagattgttgcttgttccttcctctggaagctttgtcccagaggggcccctgccagatgccagccggagttctcctgtatgagatgtctgttgacccctgctgggaggtatcttccattcaggaggcacaggggtcagggacccacttgaggaggcagtctgacccttagcagagctcgagcactgtgttgggagacccactgctctgttcagagccagcaggcaggaacgtttaagtctgctgaagctgcacccacagccgccccttcacccaggtgctctgtcccatggagatgggagttttctccgtaagcccctgactggggctgctgcctttctttcagagatgccctgcccagagaggaggaatctagagaggcagtctgggtacagcggctttgcagagctgtggtggtctccacccagttcaaacttcccagaggcttcgtttacactgtgagtggaaaaccgcctactcaagcctcagtaatggtggacacccctcaccccaccaagctcaagcatctgaggtcatcttcagactgctgtgctggcagcgagaatttcaagcttgtggctcttagattgctgggctctgtggggatgggatccactgagctagaccacttggctccctgacttcagcccccttttcaggggagtgaagagttctgtcttgctggcattccaggtgccactggagtatgaaaaaaaaaactcctgaagctagctcagtgtctgcccaaacggcagcccagttttgtgcttgaaacccaggtccctggtggtgtaggcacctgagggaatctcctggtctgtgggttgtgaagtccatgggaaaagtgtagtatctgggccataatgcaccattcctcacggcacagtccctcatggcttcccttggctaggagagggagttccccaaccccttccacttcccaggtgaggcaacaccccaccctgcttcagctcaccctccgtgggctgcacccactgtctagccagtcccattgagatgagccaggtacctcagttggaaatgcagaaatcacccaccttctgcgttgatcatgctgggagctgcagaccagagctgttcttgttcagccatcttgccagctacctgttccctctatttttttctagtgccttcatgtgggttacttgggcatttttaaagaattttattttttatttatctatagtattcttaagtgtatcaatttgtatagtttgttaattgttactttaggtattagattatacatgtataatttatcacagtctactagtatcaacatttcacctctttgagtaaagaaaccttacctccctttatgtttctgtaccttcctccctttatagtacatcttaaatgtgtcctctacacatatcaataatcacatcagtcttatagtttttgtttcaatcatcaaacataatttagaaaggttaagaggataaggaaagtctgttttatttacccatattttaactctttctgttgtccttccttccttccttccttccttcctgatgctcttttttttcttttatcatttcctttctgtttagagaacttactttttctattcttataggttagatctgctgataagttcttttcgtcttccttcatctgagaatgtcttgatttccctttcactcctgaaggatattttcactgggtatagaattgggtatagaattgtctggactgacaattcttttctttccgcacttaaaaaatatgccacttccctctgacctccatggtttttaatgagaaatccactgtcatttaaattattattctcatgtgtaatgcatcatttctctctagctgctttccagatttgttctttgtctttatttttcagacatttgattattatttttattggagtggatttccttgggtttatcatgtttagggctcattcagcttcttgaatctgtaggattatgtctttcataaaatttggggaagtttcagccatttctttgaatattttttagtgccactttctttctcattctgggactctgaagacaaatatgtttgatcttttcttgtcacacaggaccctgagactctgttcattttttttttcagtttcttttctctccattgtctagattgggtgattgctgttgctctgttttcacgttcactaatttttttttctttgttgagacagagtctcactccatcacccaggctggagtgcagtggcacaatcttggctcactgcaacctccaccacccatgttcaagtgattctcgtgcttcagcctcccaagtagctgggattataggcatgtgccaccatgcctggcttatttttgtatttttagtagagacaggatttcaccatgttggccatgctggtcttgaactcctgacctcaagcgatctgcctgcctcagcctcccaacatgctgggattacaggtgtgagccactgtgcctagccaggttcactgatcttttctgtgtcatctccattcttctatttagcccatccagtgagttttttattttggttgttgtatttttcagctctaaatttttcatttggtttttcattatgttttctatttctttgctaatactttctctttttttcattgtgtttctagtgtgcttataattgctcattgaaacactttcatgatggctgccttaaagctcttgtcaggtgattccaacgtgtgtcatcttggtgttgacatttgttgtctgttctcattcaaattgatatttttctgattcttggtataattaaggaatttttattgggacctgtagattttaggtcttttgagactctggtgaccttgaactctgtgctcttacgcttcaggctaaaaagcctatagctttctgcctgagctctaccagccatcacacaaaatacacgtaaatgtgactctcacccagtgtggttcccttctttcagggattgaattccctctacttctgcctgattttgattattctccaatacccttaaacaatttatcataaaggttagtctgatagaaattattccaccattaccagaagccagaagtcaagacttactgttcattatattccttctggtaccttttgaaatttttaccatgtgtatatgacatcttaaaagaatgtaaacacatttttgtaactaaaactttaaaaatgaaataaatatatttatcagacagacctacttttattgaccagctctagggaaggatcatagtaacaaaatgtactaggcaagttgagcaaatcatttaaccagtgtccctcagttttctcacccataaaatggagattaatgtgagtattaaatgtgttggtctaagtaaagtgtttagaatggtggctgacatatagtaagcactcaataaattttagatatcattaatattattgttaattgttaataaatattggtaaaaatatcacagccagggacctattacctcttagtccctaaatgctgacagtttagtacccagtgagtgcctaataagtgtagaaactgagtatggtgctgtattaggtactatgtgattttagcctcacagctcttgctaataatactgacagctcatggaacaaaacattgaaaaatatcaaaattaaatattatcatatatgaatgaaggtgagtatgagcaaaaacaatagaaattgtatatttgagttttatatttagataaagtcatagtaccaggcattcagcaaactatcttcctactgtagaaaatgcttcatataggtaggatttaggaactctttaaatacaaaaggaacttaacatttatgaagcaccaattatatccctagtgtatatatgctaggttctttacatatattatctcatatatgtctgtcagcaaccctgggaagtaggcattataccccatttaccaatgagaaaagtaagactcagaaagtaacttgcccaggatcaactagtaaagtagtagagtcaggattccatcccaaacctgtgtgatttctgggcttatcctcttttccttactttcagcagggtccgggattttggtttaaggaatacatgagagaaaagtaaacatttattaaacatctactgctgccagacattgtgccacatgcattagtttatttagttctcaaagcattattgtattcaattctcacaaaaatcctatgagaaagaaaagaattaacatttattgagcacatgcgatgtgcctaacacttcagtgaggcttatgtaagttaccttacatggtctcctaacaacccaatgaaactggtataatcctgacaaccaggaagaggccaagctaagctttcaccacacttagctgccttgcaaggccattctaaaggacaacctccaggacacatgtttctaaacattttgcagaacatgcattccacaaaatgacatttttaaaagtacagtccagaagcacaaggtttctccaaacaagtggtttctcatcttttgggtggccatggacccctttgagaatctcacagctcctcctcccagataagtacttatatacacacgatattgggtataatttcagaccattcagcaatctcttaaagcacatcaatggactctgttcaaaacagaaacttgctctaaagaacagaagtaaatcttagaaaacaagagagcttattaatccttcattattcagttttaaaaatcctctagaacactaacacccatatttgaccattctattatgtttcacaaagtagatagtactcctgtttctcttttggtttttcagcacaagcactattggcttttctggtagtataattctttttttgttgagtagggggactgttctatgcattataggatgctgagcagcatccttggcctctatgcgctagatgccagtagaacactccctacttcccctctccagttttgacaaccaagaatgtcttcagacattgccagatattctggggagcagggcaaaattgcccctgttgagaacaactggtttatatacttacaatcatcacacatgagacactcacaagtataaagggcctaagaaccaacatttcttgaagtatatccttttcttgcttgattaaagtctcctacaaaactgctcaactgggttgagcaagatgaattcgtctcaacaattaaattactagctgaatatgtaaattgttgttacctaaaaggccaaaaataaagtttatatagcccctctgctttattgattggatgtttgacttatcaagtcattcagtcattcagtgactatttattgaatactaacaatgtgccagacactgccaagtgctggggctacaatggtgaacagtgtagatgtggtccccatgccatggaacttataatccagtaagaaaggtgcactaaaaaacacgcaaaacataagtcaaaagaattttaacctgtaataagtgccataaaggaagcatatggggagtggagatagaaactatcaaagggatttaaatcaggtctctaagaaaggcctttctgaaggtgtgacatttaaggccagaacttcaggggtaagaaagactcagccaggtgaaaaaaaaaaaaataactaaagggcaagtgttccaggcagagtaggcaaccatgtacaaagatgctgaggtaagaaagagctcagtgtattctgggtgctgaaaggaggccactgtgactaaggctaatgagtgaaggataagaggtaagagatggaatgggccgggaccagaccctcaggggcccctgtagaccacggtgaagagagtgggatcttattcttagagtcagaagccactgaaggcttttaacaggagaggtaccaggatgtgatgtgtgttttaaaactactctgagccaggcatagtggctcatgcctgtaatcccaacactttgggaggtcaaggcaagaggatttcttgagcccaggagtttgagattagcctgggtaacatagtgagaccctgtctccacaaaaaaaaaataaaaaattaattgggtgaggtggtacatgcctgtagtcctagctaatcaagaggatggggaaggagaatcacttgagcccaggagtttgaggctgcagtgagctatgatcatgccgctgcactccagcacaatgattaatatcatgaactcagacccaatctgtgtgtgtttatatcctccaggctctgccacttatcagccgtgtgacattgggcaaatgccttcacctctctaagcctcgattgtttgaggattaaatatacttgtaatacatataaagcccttagtatagtggctgataaatgcttagtaagtattagctaatatttatggaaagaaaaccagatgtcaaaagtttaaaagatggagagaatgctgagatgtgtcagatgcacctaagagttccaataagctaaggacttattcattagatttggcaacatggaagccattgttgaccttgatgagaggaacttcaacaaagtggaggggcagaagccagataataatagattgattggtgaatagacggtaaagaaaatggcagcaacaggtaggactaactttttcaagaagcttgttgtttaagaaaaaaaatcacaatcaagtgaaaaaaaaaagaaggatrtacaagaatgttcaccttagccttgtttatgataacaaaaaagtggaactgtcctaaatgtccaagaatgaggggatgacaggtcaacagagagggttggggaaagtggtatatgttagaacagtaattcagcagcatgggagaggaagctgaccagagacaagtaaaaggataaacaagaaasctgcaagtgcatgtgaagttggaaaccatggattttggcccatgatactcgtctgtccagtgatacagttttcttcagtagtgacagaacagagaaggcacgttgcgggaggtggtgttgacttggagtggtgatttttccaggtaggtggggcaaaaggtgatgaaggtgatggagaaagagggttcaagtgtgtaatcatgtggtctaggctggttgtgaggccaaaagacagcagacaaacagggagaaggcagggatcaggggattgggtgtctacacgaggtcagaagagcagagatagtggggtgaagagacttggtaggactagcacttggactcagtgtaagacaatagaggcagcgaagtagaaagggcacatgcttttgaaatcaaacacatttgaatttgaattacagctctaatattagttatgtgactttaggtaacttctttgaactctgcgaacttcggtttcttcatctgtaaagtaagtataatgacacctgagtcacagaaaaactaacacatggtcagcttcaatagctgttagtccccttctctcccactcaacatttattgggctcttaatatgaaacattctattttggggacactgagataaaggccaatttacttccttttagtgattcatggtttagcacaagggacacaaagaaataaatggcaatacaagataaacagataaactagtgttcaagttgctaagtacaataatagcagtatgtgctatgagaacccagaagaggtatgactaatagtgcctgagagagtgagggaggctttcctgtaaagctattgacaacccaatttttagtttctaacgctgaaagaaactagtgggaaatgagcagataacattttaaggggaacagcaaagaagcttttgcttttatttttctagacggcgtttcaaggagcaataggttcacaagaaggtgtttatttgttttaaggaaaatgacttgtgatggtttgttaactgaggagaagaaatacataattaaatgagaaatgtctaaggtgattgagagaaaaggaaataatcaagagttcaaggttctagagaaggaggcaagaggaggtaaaatccggagcctacgccaagggtttgctcctggatagtatgcagaataaccctttctctaaaatgagaggaaaaaagaaaagaagaaaagtagacatagatatttacatccaaaaggaggaaagaagtcaatgtctggaaattgcattttatctgtatacaatttttcttgatttttagaaaccaagaatatttccttaatacattcacaagaaatgagagcagcctgtttagggaactgattcctacaactggtggagctgccaaatgttggtgaaatggaggcaacagaaataaagagcttccaagccctcatttctgcacctggaagaggtggttctgattgctgcagcagcaggcaactgtgacagggagcagcaacctcctctcagttgctttcaccttgagttcttaaatcgttgctagataagcctcttttgcccactccaatcttcttttgctccagtccacacacacacactctatgaagaaattttccaacctgaattttgcccactgatgaatagaattggcagcccacaaggcagctgtgctggcttaaaggacccagtagcatttggctgcattattctctgtcctgacctttgcagccagcacctccccatttctgggagaatatcccacagtcacttctcactggcgtgcacctccaggaaatacaccttctgaaatgtgggtttctggcattggtatggagatagcatcgctgcctagcccaatagcaaaagatagactcgggcactgggaatttaccggctgctttaggcctaatacctcgtcaagttgcaccatttgataaaatcagaggaattaattaaaaaccatattagaaaccttcatataattgctgatttcctgcttatgctctaagcacatgccaaggtagcaaaatgtacagattgaaactggatttcttgtccttttaccattaatgtaaaacatgtctatatttcctgctaggtcacccattggccttataaactttttttataaccaggaaagatactccaagggagaaagagtatccctgtaaggaaatagggtttcttccaaggcaaggaagaaaataatatttccttagaggagtacaacaggacaagggcacaggaaggtgaggagactctgcctcttcaaaggaaattagcagaatgcatggaaaagaagcaaaaaaaaaaaaaraaagaaagaaagaaaggaatcaaacatttattgagcacctactatttaccaggtactttactagttgctttcacaggacttatttcatttaatcctacaataaccttgtgaggaacttatctacgtccataggagagaaaattatgtctcaaagaggttaactggttggcctaaggtcccacagctaccaagtgagtaggataggagagcaagggaagagcagtgaagatgcttggacaagagaggagatctttgtcatttccattttgaaactagagaactggtttcctttaagactcattgtatcagcaggcagtgcttttctattcctggagtgaccttagactggaaggttaattgtcatttttaaaaaggggctagcattctttcctcaccttcagtactcctctcttacctctatgctcattctcttaaatcctccaagctaatctttcagaccactcacttcctcaattaattagaatacatcctctgttctttctactcccttgttggttcattagttcaaacaacaatcatgtattaaatgactactatgtgtcagcattctgccaggcaccaggaaagcaaaagtaaaaaccctattcctgctttggaaagattcataatcggcagggcgcggtggctcacacctgtaatcccagcactttgggaggccgaggcaggcggatcacgaggtcaggagttcgagaccggcctgaccaacgtggtgaaaccccgtctctactgaaaatacaaaaattagccaggtgtggtggcgcatgcctgtaatcccggctactcaggaggctgaggcaggagaatcgcgtgaacctgggaggcggaggttgcagtgagcggagattgcgccactgcactccagcctgggtgacagagcgagactccgtctcaaaaaaaaaagaaggattcataatctaaaggggggccagagacatggaatcattggtttaaatcctattgcaaagggcagtggcagatccaggatttgtaggcctgagcttatgcaattgtacaggcaaggacagggaactatttaagaaaaagaacataaaattttgaatataaaattaggtgcaagttgaaagatattacaaacctcacaaaattcaaaacaattttaacatgtcttattacttaaatgcatgacacatctatagtacttttttcctacatttttttggctgcatgtgctctaatcacctttcatttgaccatgattttgtaatgtcattttcttttttttttaattttattattattatactttaagttttagggtacatgtgcacaatgtgcaggttagttacatatgtatacatgtgccatgttggtgtgctgcacacattaactcgtcatttagcattaggtatatctcctaatgctatccctcccccccccaccccacaacaggccccagagtgtgatgttccccttcctgtgtccatgtgttctcactgttcggttcccacctatgagtgagaacatgcggtgtttggttttatgtccttgagatagtttgctgagaatgatggtttccagcttcatccatgtccctacaaaggacatgaattcatcattttttatggctgcatagtattccatggtgtatatgtgccacattttcttaatccagtctatcattgttggacatttgggttggttccaagtctttgctattgtgaatagtgctgcaataaacatacgtgtgcatgtgtctttatagcaggatgatttataatccttagaatatatacccagtaatgggatggctgggtcaaatggtatgtaatgtcattttctatgtaaagaatagaaagataattcaatggatcccctagcatgtttgatcaaaatgtatttcttattattgatacgtggtatagtaatctattcaggcttccaaaacaaaataccccaggctggagggcttaaacaacagaaatttatttctcacaattctggagactggaagtaccagataaaggtctggcagcgttcacagtttctggtgagggctcgcttccttctctgtatgtcttcacatggcctttccacttaatgtgtgcagagagagagaagaaaatctctctctcttcctcttcttataaggccacccatcctattaaattaggaccccacccccattacctcatttagtctaaattacctcctaaaggctctatctccaagtatagtcacagtgggggttagggcttcaacatatgaattccgggataacacagttcagtctagtagatgggatgcataaaacttgtgactgcatacacagccatactcactgtttataatactgctaggaggtttggacccttcaaaaacaggaattatgataaatgccattttgcacaacttttatgaaaaaagaaaaaatacagtttgtatatactcatatatgctacactattgactctgttttttaaaggagaaaattttattttgactaggcattgttaaaaaccaaatcctccacttaaaattttaatatgctcattggaagaattttacacaaactttgaactctgtacatttcaaattttgtttctcctctactatccaatgtatctaaccccagatgctataggacacatttatatcatgatgctacctctggctctgtcctttttgtgtaaggatgcyggatgagtaaacaccttaggttataggaccattcctgaagccattcctacaccattagcagtaagttaactatacacaataagtgattgcaagccacataaatgtatctctctaaacccaaactaaatgtatcctcacctcaacttcctcttcgccattccagttacactcaaaacaagggagaagtctgatggaaaagtcagactggaaagagagagctgtcttaaatgaatgtggttaaataccttactttgaaaattaggggaaaaatataaccttgtaaaaaaccagtggtggtacccctccctggaccttgagagggatctgtccagtgaggggctttgaagatttatgattagcttcatggtgaatcagcttctaaggaaagatatgtgcaggttgtctcaaacaatcagggaacacgtcacaaaggaggtaatatttgagctaaatctttaaaagtactcaagaggaaggacatttcagaaaggaacattgcatgtgcaatgctctagagggaacacagggtcttgtagaattgtaaatagtttactatgtctgtaggggcatctaaggggatgggggggaaatgaagcagcagaggttgacctgcaactgaaagacatcagactcttggaaatccatagaaacctctgttttcatcttttcttgagctaccttaaatgatctgacacttattaggaagtagttagtttatctgttattgtgggtgtgatagaaaaactagatggaaaatcagtaaagataaagaataattcaacaacaccatcaaccaagagaatctcattgacacttacagaacattccaccaaataacaacagaatccacattcttttaaagcacccatggaacataccaagatagaccacagcagaaaatggtggagtaggcaaccacaagctcctgttaccccacagaaacacaggaaaataagcagaaactgtcagamacaactttgtcagaacagaactctagaaaacaatcaaaggtttacagcaactgagcaaatgccaaatcaaaaaaaaagtcaacttaaaacttattagaaaccacaatgagataccacttcacacccattaggttgtctattattaaaaaatggaaaataaaaagtgttgtcaaggatgtggagaaattggaactctgctttgctggtggggatgtaaaatggtgcagctgctatggaaaataggttggcagttcctcaaaaagttaaacatagaattaccatatgatcccacaaatctacttctagatatatagccaaaagaatcaaaagtgggtactggtatatcaatgttaactatagcattatgcaaaataaaatagtcaaaaggtgtaaacaacccaaataaccatcaacagatgaatggacaaaatattgtatagctatataaggaaatattattcagccttaaaatggaataatattctgatacatgcaacaacatgaatgaacctcaaaaacattattctaagtaaaataagccagatgaaaagggacaaatattgtatgatttcacctacatgaaatatttacaataggcaaagtcatagagacagaaagtggtttagaggttaccaggggcttggagaagtgggggttggggagttatttattaatgggtgtagaatttctgtttgagatcatgaaaaagttctggaagtggataacggtaatggttgtgcagtgttatgaaaatacttaataccactgaactgtacactttaaaatggtttttaaaaatttcaacaaggagttggaagatatagatgaagaaatctctaagaaaacagaatttgaaaatagggaaatgagaaataggaaagataaaagacaagaaaattatagtcaacagatgaggtccaatagccaataagaattcctgaaaaagaaaagagaagaaaaatatggctaggaaattatcaaagaaataattaaagaaaatctgtccaaatcctgaggatacaactttccagactgacagggcccactggttgcccaacattatgaaggaaaaaagatccaaagacattatcatcataaaactttacaacaaaggagaaaaaaagctatcctaaaaggtaaacagttgtaaggagaaaaattgaagatcacataaaaagcttcaagaatcagaatggcattggacttctccacaacaatattgaatacttcaagacattggaggagttcctttaacattgtaaaggaaaaattatttcaaccttgagttctatacccagccaagctaccaagcaattggaaagatcaaatacagatattttcagacatgccaaggtcaggaaacttggagtagatgtccaccagaatgaagataataagccaggaaagagaaagacatgggacacaggaaacagatgctccaatgcaggagagaacagcagagatttctcaggatgacagtgaaaggaaactccaagacaccagctctgtagaagggccagaagtcaaacagttcagattggagggctccagagggaagactctcaggtgaatatggaattcacagattgcctggtgtggttgatagtactaagaggactaataattctgtcaaagaatgtagtatgagttagtgataagtacatagaaagctaagcaacatttctaaggtgaggcaactattaattcaaaaaaattgtccaaggaagtaaaagtagtcataatacagtacatagctgagctgtgaacagtatttgttgtcatcataatttaaacattgaatgttaatttagccaaaaattttagaataattaaattgagagaatgagacaaggtgaactgtgcatggatgtgggagattgtggtgagactgaatctagaaggaagttggtagagcatataaaaaattgaaaaacaactagcagccttcctgtgttattcaaacatatggagggaaatactagaagcagcagctaaaagagtggtatgtggctatttctggggagtaaaaattggaaacaggaaagggtgaggtagagaacttctgtgtgtaattgtaagacttggttaatgtttgactttgtaaactatgtgcatgttattaaactactacttggaacaaaattcaaattaaataaaagttcagtgtcagatctaaaggtgcaccatgtaatcctggcctatgtgtgatgcccactaggatgaactgttaaaggaaaaagcatctcagggtaaaattaaaaagattcctttttaaaaaaaagttataattttttaatttaacttttattttaagttcaggggtacatgtgcaggtttgttatataggtaaacttctgtcatgggggtttgttatacagattatttcatcatccacattatattaagcccctgctctggctcagcaacagtattgaagacagcagcctgtgtttgcagtgtgggaccctggaccatggttccagggggaacacagcagaccttattcaaaaattattgtgtaggtctgctctaacctgtcagagggctatctaaatgacagatgtaaagaacttatctctgttgcacctaactcagaactcacccaagccagaaaattaccaggcattgctcaaaaaccctaagatggatgaacaacccagatgcctgaggcaaagggttacagttgaggcttacaagagacaacctaaggcctgagaagaaaagccatagggagagcttctttgggaaattagggcaaacaaaagtatccatgtatacgggaaaatatagaaaaatatgtgaataaattgccagggaaacttgcatgttcaggaaagacttgagaggaccttaaagactgggagaggtgttttacttgtctggattttttttttagctcctggcattcaaggatagcaattcactagaggcttcaggcacaagacagaatcagtgcacttggaagataggataattgaaatgaaccaatctgagggacaggaaaaaaaagaacgaagaataattagcagagcctaagggacctgtgggacaccatcaagtggtccaacatacacattatgggagtaacagaaaaaagagaagaggttatgaaagggatagaaagaatttttaaataaataatgaccaaaaacttcccaaatttgatgaaaagcattgaacataaggatccaagaggcttaatgaactccaagtagaataataactccaagtagaatagacccacatcaagagacattataatcaaactgttgacaaagacaaagagagaatcttgaaagcagcaagagagaaacaactcatcacatacaacaagggattctcaataaggttcataactgatttcttatctgagaccatggaggccagaatacaatgggatgacatatttaaagttctgaaagaaaaacactgtaaaacaagaattctatatccagcaaaactgcacttcaaacttgagtgaaaatgtaagacattctcagataaacaaaagctgagggagtctattaccactaatcctatcctagaagaagtactaaaaggagtccttctggttgaagtgaaaggacactagactgtaaatcgaagctatatgaaggaataaagatctccagtaaagaaatctacatgggcaaacataaaagcaagtcttattaatttttggtctgtaacttgactctttattttctgcatgattaaaaagacaaatacataaaaattataaatctatgttactgggcacacagtgtataaatatatgatctgtgacaacaacaacataaagaaagcagtggaactgaataatagcagagttttcatgtgctattaaagttggtacatgggtagagttggaagccattatcctcagcttactaatacaagaacagaaaaccaaacaccacatgttctcacttttttccccaacacgtggacacatggaggggaacaacacacactggagcctgtcgggagggggttggggaagggagagcatcaaaaagaaagctaatagattcaggcttaacacctaggtgatgggatgacctgtgcagcagaccagcatggcagacgtttacctgtgtaacaaacctccacatgtacacctgagcttaaaataaaagttgaagaaacattttaaaaattaaaaaaaaaaagttggtatcaattcaaactagattgtaataagcttaggatattgattgtaatcccatggtaaccacaaaaatatgtttaaaatgtaccaatggaaatgagaagagatccaaaatggttcactacagataattaactaaatacaaaataagacagtaatggaggaaatgagggacacaaataggtataagataaagagggaacaaaacgaaaaattgcaaaaatccatccttatcagtaaacaaattaaatgtaaatagatgaaagtgaccaatcaaaaggcagagattggcagaatgaatttaaaaaaaaaacataatccaactacatgcaatttattagagacccagtttagatccaaaggtgcaattaggttgaaagtgaaagagttggaaaaaatattttattcaagtggtaaccaaaaagaggtggggtggcttactaatatcaccctcagtcaacaaatgttataaaagtcaaagtcagacgttatgtactgatcaattgattgagacggtataacaatcataaacacatatacaccaaacaacagagccttaaaatatatgaagcaaacrctgaaaaaattgaagagagaaatagttgtacaataataggtacagagaataatagtacagagaatcaaagccaaaatttgtttctttgaaaagatcaatgaaattgacaaaccttgagctagactgacaaagaaaaaagaaagatgcaaataactaaaatcagaaattaaagtggggacattactgtcaaccttacagagataaaaattttaaaaaggtttgtaagacaatactattaacaattctatgcttacaaatgagatagcctaggtgaaatgaacaaattcctagaaacaaacaaattacccaaactgactcaggagaaatataaaatgtcaggagatctataacaaataaagagattcaatcagtaatgaaaacttcccaacaaaggaaagccaaggaccagaaactttcactggtgaattctaccagacatttaaagattaacaccaatccttctcaaactcttccaaataactgaagaagcaggaacacttcccagctcattctatgagatcagcattaccataataccaaagccagaaaaaaaatcacaagaaaattacagtgcaatgtatcttatgaatatagacacaaaaatctttcagtaaaatactagcaacccaaatctaaccatatattaacgtcattatacactatgaccaggtgggatttatcccaggaatgcaaagttcatttaacgtaataaaatcgatcaatgaaatgcatcacattaatataacaaagaaaaaaaacacatggttgtctcaaaagatgcagaaaaatatttgacaaaaatcagcaccctttcataataaataagcaatcaaaatattaggaataaagggaagttactcaacatgaaaaagggcatttatgaaaaacctacagctaatgtcatactcaatggtgaatgactgaaaacttttcctctaagatcaagacatgaatattaacttttaccactgctattctatgttgtactggaaggtctatccagagcaactagacaagaaaaatgaataaaaggcatccaaattagaaaggaagaagtaaaaccatcctgtaggttgtcttttcgttttcttgatatgtcttttatagcacaaacattttaaactttgaagtcatatttaccattggttcacactgtaaccagcagcattgcaggttacaatgtcattacacaaaatcagatgtgcttttatctaccaataatgaacaatccaaaagaaaaattttaagtaattgcatttatagtaacatctaatagaataaactcaaccaaggaggtgaaagactagtacactgaaagctacaaaacattgctgaaagaaattaagacctaaataaatggaaagacatctcatgttcattgattggaagacaatattattaaggtgtcaatactacccaaagcagcctccatattcaatgcaatccctatcaaaatcccaacagcccttttgacacgaatggaaaaaccaattctcaaattcatatggacttgcaagaaacccaataaccaaaacattcttgaaaaaggacaaaagttaggagatccaatttcaaaacgtaatacaaagctatagtaatcagaatagcatggtgttggcataaggatagacatataaaccaatggaatagagtcgtaaatcctaaaataaatctctacctctataaccaattgttttttgacaagggtatcaagtccattcaatggggaaggaatcatctcttcaacaaatggtgcttggacaacaggatatccacatgcaaaagaattaagttgcacccctacttcacaccatatacaaaaaaattaactgacaataaatcaacaatctacatataagagctaaaaccataacaatcctagaagaaaacaatgaatgcatgtgtctttatggaagaatgatttctattcctttgagtatatacccaataatgggagtgctgggttgaatggtagttctgttctaagttctttgagaaatcatcataatgctttccataatggttgagctaatttacattcccaccaacagtgtataagcattcccttttctccacaaccttgccagcatctgttattttttgactttttaataacagttattctgactggtataaaatggtatctcactgtggttttgatttgcatttctctaatgattagtgatgtggagcattttttcctatgtttgttagccattagtatgtcttcttttgaaaagtgtctgttcatgtctctgcccactttttaatgggtttgggtgttttttgcttatttgtttaagttccttatagatgcatagtttgcaaatatttcctcccattctgtaagttgtctgtttatttggttgatagtttctattgctgtgcagaaactctttggtttaattaggttccaccttgtcaattttttgttttcattgcaattgcttttggcatctttgtcatgaaatctttgtgtaggcctatgactagaagactactttctaggttctcttctaggatttttatagtgtgaatcttacatttaaatatttaatgcattttgagttaatttttgtatatggtgacagataggggtccaattttattcttctgcaagtagttttcccagcaccacttattgaataagatatgctttccccattgtttatttttgtcaactttgtaaaaaattagttggttgtagttgtgcagctgtatttcaggggtttgtattctgtttcattggtctatatgtctgtttttataccagtaccatgctgttttggttactatatccttgtagtatagtttgaagttggataatgtgatgccttcagcattgttcttttggcttaggattgctttggctattcgggctcctttttggatttacatgaattttagaacagtgtttttataattttgtgaaaaatgacattggcaatttgatagaaatagcattgaaacagtaaattgctttgggcagtatggccattttaaaaatattgagtcttcctatctgagcatggaatgtttttccatttgtttgtgtcatctctgatttctttcagtagtgttttataattctcattgtagaaatctttcacctccctggttagctgtattcctagatattttattccttttgtggctattgtgaataggattgcgtttttgatttggctgtcaacttggacctgttggtgtctagaattgctgctgatttttgtatcttgaagccttgctgacattgtttttcagatgtaggaacttttgagcagagactgtggcattttctaggtatagaatcatatcatctgcaaacagagatagtttgatctcctttcttcctatttggatgtctcttatttctttatcttgcctgattgctctggctaggacttctagtatgacgttgaataggagcgatgagagtaagcatccttgtcttgttctggttctcaaggggaatgcttccagctttttcccatgaagtagcagaaaagttttgtaaataaatagtgatgatggttgcacagtgttgtaattgtaactaatgtcactgaattgtacacttaaaatggtcacagtagtagagtttatgttttatacattttattacaataatattaaaacaattaaaaattaaagaataaagatgggccatttcatgggtcatcaaataaacctcatcaaatttaaaagacagaaatcatacagtgtgtattttctgaccaaaataaaatcaaacaggaaatcgataaaagaaagataacaggataattgccaaacacttagaaactaaagaatgcacttctaaataatacatggatcaaagaggaaatctcaaggaaaatttttaaaatacactaaacaattaaaatgaaaagacaacgtgtcaaaatatgtaggacacacctaaaacagtgctgagagggaaatttatgacactacattcttaattttaaaaagaggatagtctcagatcaataattaaactgcaaccctaataaaatagaaaaagaagggcaaaataaaaccaaagcaagtagaargaaggttataataatgaacagaaacaaatgagattgaaaacagaataataataaattcaatgaaacaagaagttggttcttcaaaaacatgaaaaaaatttacaaatctctagtaagagtgaccaaaaaaaaaaaaaaaaaaaaaaaaaaaaaaaaaaamcagagaagacacaaatttccaatatcaggaatgaaatgggatcttaccacagcttccacaggtatcaaagcaatactagcaaaatacagcattctatatacataaacttgaccacttagattaaatggactcattcctcaaaagccacaaactaccacaactcaccaaatacgaaataatttgaatggccccgtagctattaaggaaattgaatttgtaatttaaaaactcctcaataaatgaactctccaagcctagatgatttcactgaagaattctaccaaacatttaaagaaaaattcacaacaattctacacaatctttcagaaaatagaagaggaggaaacacttcccaactcrctttattaagctagtattatcctgagaccaaaaccagacaaagatagtaccaaaaaaagaaagaccgtatttctgctctcagctttgacatctgaaagacacagcaggcagcatctcagaagcataaaaaacagaacggaagaaataaaactgtccttatctgcaaataacatgattgtgtacatagaaaatctcaaggaatgtaacaaaaaccttctagaactaataaatgagttcagcaaggttgcaggtcacaatatcaacatacaaaaatcaattctatatactatcaatgaacatatttctatgtactattaacaaacacatggaaaccaaaatttaaaatacaaagccattcacaattggattttaaaaactgaaatatttatgtgtaaatctcacaaaacatgtactggatatgtatgctgaaaactataacactgatcaaagaaatcaaataagatctaactacaaggagagacatactgtggccatagtttggaactcaacatagtaaagatttcagttctctccaaatttatacaggtctgagacaattgctatcagaatcctaacatgattttttgaagatatagacaagattatggtaaaattcatgtgggaaaacagagaaactagaatagctaaaacaattttgtaaaaaaaggataaagcaggaggactcactctaccaattttaagactatgtagctacagtaatcaaaactgtgtggtattggcaaagaaacagacacatcaaaggaacagaagagagatcccagaaatagacccacacaaatacggccaactaaattttgactaaggtccaaaagcaattcaatggaggaaagacagccttttcaataaatagtactgaagcattttgatatctatcagcaaattagtaaatttagtttaagagtaagtagaaattcattatattgtttttgtagcttttctatagatttgaaagttttcaaaataaaaacaattgggaggaaaagacatataaactatattgcagttacattaatttacaatggaagatatacctgtaaggtaaccgaacaatagtctgagctcatgtaaatgcatttctttcccaggatcaaggaacctaggaaactaaaatagaaaatcagaaagttacttgataaacatggagtcagagtgaaggaagtgcaatggtgaagcccatgcatagagaaatctgcttcataattgagcctacagccttaaggaccacaatatttgcatccatcatgtgtatggtctactgggctccttctgctctccagccactgcacaagtggacacacctccctcccccattcctccccacctctctgcacagttaggggtgggaggtgttggacaaacagtaacatatgtttacttcttaattcttctttttcaaataactcatgcaccacctttctttaacacattattcttcacacagtttacagtaaagctgattagattgcaactttcttcaagtacgttctgatcctacagatacaccctgattatcttgattacatttgagatttcctaagtctctatcagtaacacatctacaataatgcctttgtattagttatttcgctctaacaatcattctaagcctagctccaaattctggggtcaccgtactgcagcytagactccgactacacttatttcctttgagttgttttgtcaaggccccatcatagacagactttttttcaacatactgacaatattactgcttctcttggtctctttgccactgctctacaaatgtatttttacaagcagtgtgacccaaagaagatgtaatagattaaatgataaaattacataaaatacatgaaagtgctttgaaaggtaaaagcactgaacaaatgtaaggggttattattgctgtaatttaatgggtaaaaccagtggctgcttcaggccagacctcataggagagcagcacttaccaatagataacccaggccagtccactctatagttttgccactacacatttctctcccattctcagtcccatcatgagatgaggagtctctgggggatgaatccatgcttccaatgtcacagagactgacttataaagcagacctcaagaaggtgatttatcgtaagcaatatcgtattagtccattctcccactgctataaggacatacctgagactgggtaatttataaaggaaagaggtttcattgactcagttccacagggctggtgaggcctcaggaaacttacagtcatagtggaaggggaagcaaacacatccttcttcacacagcagcaggaaggagaagaatgaccaaaggtaggagaaagccccttataaagccatcagatctcgtgagaactgagtatcagaagaatagcatggaggtaaccgcccccatgattcaattacctcccaccaggtccctcccattacacgtggggattatgggaactacaattcaagatgaaatttgggtggagacacagccaaaccatatcaaatatatttggcaagacaaagctttccttatctgcataaggccttccaggctggcaggtcattccagtcaagaaaccagttacacagcttcatccatgtccctacaaaggacatgaactcatcattttttatggctgcatagtattccatggtgtatatgtgccacgtggcgcatgttctcactcataggtgggaattgaacaatgagaacacatggacacaggaaggggaacatcacacaccggggcctgttgtggggtggggggtggggggagggacagcgttaggagagatacttaatgttaaatgatgagttaatgggtgcagcacaccaacatggcacatgtatacatatgtaactaacctgcacgttgtgcacatgtaccctaaaacttaaagtataataataataaaaaaaaaaaccagttacacagaccagaaggctgcttggtaagcacacaattaaaacaaaaggaattggatgttctccagagatttttttaaaaatcaaacctaggtacccgataaacttgctctcctccatactaagaatagttctgactaaagaagtaaagaagccatcatcaagaaatagacaaccctctccatggtcattcctgaagacacactcacatattttcttttgtctacacagctcactttgcccatcatctaaagcatctgtctgtacagggttacctcaagacagtcatgttacaatttcccacatcatagtttatcttaacatttgtaacaatttagtgaggtcgtttcttgataccttaatatctccatttcccaatatataatgggtaccatggcaggcaggacccattgttctctatttcaaaatttgctcatccaacattgccaaaaataaatttatggctcatttcttaaactttttcacccattttccccatctcataaatacccaaagtacattctaagtgcactatcctaaaggccctacccaaagtgcctgtaggatattatcaaaacctagtctgttgctttagtgcagaagtgtgggtgctacctgaaggcagaaaggaatacytataagcttgtacccagtaccaattgtttgggaaccagaaatctaggctgctacatttcaaagggaagtgagaaaattggagcttatgaaagataaatgactcaataaaatggtatacatacagagcctggcacatagtagcccctcaataaccatttgtaataagaaataagcaaagtatccaaggtctcccaaatagtgagtgacagagtcaaaacttccaagtctagttgtttcccctctaacatgttacctcaaaaatcrtctttaaaaatattttgctttccgtcctactcttaagaagtatttaagaacagaagaaactgtctgtgctcttatttcattgtggactgaaatttgttgacttcagagccaaaataactttccttgaagccttccctaaacctcttcctctgaacacccagagccatttcttggagccatttgttagattaaattctgtcttttattatcatttgtacatccttatcccatatttctagtttcttgaataaaattcttaaagtataaatgtattcatcattatattccccacaatgagtgcccagcatagagcctagcatatagtaaatgctcaacaagtgtctgatgaattgaattgaattccattggcccaagctttggcgattctccctgatttggagcatgagtcctcttactgtctgcaatcactgttaatattttatactacaagctcagtgaaactagatatgctattctcaaaattcaatcaaatgctttttaaaatctattttccttctctttcttcattactccatttctagttgactctgcatccattgcccttttcattcatttattcatttatttattcataaatgtttgttgacctctcactatttgctggatactagaggtacaacagtacacagatggtccctactttttagaatttgtaatctaattggagagtaacactaaacacaataaaataattacatattgtgataagtgctaagaagacaataaacagatgatgcagaggtcagaacttccccctctgagggtgtcaactctaggtctgaagtatgaaagacgtaaagaactttgccaaacaaagagctgcattccaggcggagggaacagcatatgaaaaggtgggaaagagcagccgggagcggtggctcatgcctgcaatcccagcactttgggaggccaaggtgggaggatcacgaggtcaagagttcaagaccagactggccaacaggttgaaaccccgtctctactaaagatacaaaaattagccaggcatggtggtgtatgcctgtagtcccagctacttgggaggctgaggcaggagaattgcttgaacccggcaggcagaggttgcagtgagccgagattgcaccactgcactccagtctgggcaacagagcaagattctgtcaaaaaaaaaaaaaaaagaaagaaagaaaaggtgggaaagagctgaccacactccaggaaaagcaaaaatgccagtgtgactagagcatattgagtgagagaagagtgaggtgggaaagggtcagagaggtaggcaagagcctcatcatgtgggagccatgtaggccagagcatgattctgactttctaagttcagcagcagccagagtttttaagcagaggagtaatataatctaactgagatttttcaaagatgatgctgactgttgtgtggagaccatattgtactgggacaagagaccactatataggctaatccagtagtccagataggaacagatgtggccctggactagggtagtggcaaggaagrtggtgagagtgattcaagaaayatttttgcagtagaattgacagatctatgactcttttgaatgtggaacctctttgttttactgctgaggaaactaaggcacagagaggccaggttgataagaggtcatttttgtattataattgaatgctgatttcccaaccactgatttcatcttctttctctgcacctactctacttttcataatctttagaaattcccactacctttgtgtcttctcccatatgggatcatcagccacatccagcctggtccttttgtacagctccctaaatctgcctctgcttgccatgcccagtctgctctgggttattgtgactgctctctggctggcctcattgcctcctcccagctctcagaacaggtcatttttttatggcttcactttaacggtgtttccaatcacccttcagcaactctctactcactaaaatgaaaatccagacttggacagtggcttcatagcacttcctcagctagctccacccagaccttcctgtttgcccttgtctcccattgttcccattgtaacctagctcacaccttcaatctttagcctttgtagctcagtaaagtcagagctacccctcccatctctgaaagtttaagccagctcccttgtgcttaaaattctgtcttcttctgttctttctaattgactagcacagttagatatttgtcctgaatcattttagttattaattcattatttcaacaagtaaagattgaatacctcttttgggctaggcattgtactagccactggggatgaaaaacaatcagtaggacaaggtctctgccctcaaggagcttacagtctgatggaggagacagacctgtaaccaaataatcacaatgcattgcatgaagtgttacagggactgtacacttacagaatgctggaggtacacatagaaagtagccacaaatcctattgagcgaattgagaaagacttcacagaggaagtggcatttgaattgattagaaaggtgtctaagtgttttccagttgaagaaaggagtaagggcattcttggaagaaggaacccgttgttatataaaagtaatagttagcatatgttggtttttcaagtacatgtgatagggcagaatatgtttgaattacaatgataaattcagtatggctggagcatggagaaggtggagaagcttattagaaaaacgaggctggagggagagattgggacaagattctataagcagtagggagcctgtagagatctttaagagggagtaactcgatctgttttggacctgtggcagttacagtaaagttggtagacaggttgtaggattgcagaggtgattaaaatggtccagtgagagatgagagcttgaaccaacgtgaaggcagagggaagagagaagaagacatctataaagtaaaactgtcagtgttaggagtctaattagacatgatggagcaagagaaagcagagagatgcctctcaagatttctgacttaggataccattaactgggacagagaacagaagaggaagaaagaaaatactttagtttctgttagagcaatttgagtttgagtcacgaatatacacgtagaaaagtycaaaagcaaatgaatgtgaaagtgtggttctcagaaggaagtcagctcaccactcagcatgtagaaattcatccattctctaatacctatatttctttccctatattctgagtgttatgctaattgtactcttgtctgccctaaaaatcaggggtcctcctcaataccaggcttaagtccttgcagtggcctacaacaccctacatgatctggctcctatcacttttctaacctcatttcctactattctctcccaaccacataggcccttcttgctgtctctggaacatacctggcatacccccactttcatattttacattggatgttttctctgcttagagtgctttccccccggccaggtacagtggctcacgcctgtaatctcagcactttgggaggccaaggcgggtagatcacttgaggtcaagagttcgagaccagcctggccaacatggtgaaaccccatctgtactcaaaatacaaaaaattagccaggtgtggcagcacatacctgtaatcccagctactcgggaggctgacaagagaatcacttgaacccgggaggcagaggttgcagtgagccgagatagtgccattgcactccagcctgggcgacagaacgagacttcctctcaaaaaaaaaataaagaaagaaagaatccttttccccaagatgttcacataagtaactccctaacctccttcaagtctttgctcagttgttgctttctcaatgagacttactctaaccaccatatttaatcctacagctgactatcctcgcttccctggccactcccaatcactctttttcaatttttttcagctatagcactaatgagcgtctaaacatactgtataatttacctacttattatgttttttatttatcagttctgtccctcccctagaatgtgagattctaaagggcaggattttttctcccttattcactgatatatattaagcacctggaacagtgcttggagcatgataaacactcagtatatatttatattggtcaaacaaatgaatgaaagtgtaggttctcacatcatttgctctcctaaactttctgcttgccatgggccttgaaactcttagagccaaataaaaatataagaaggggaaatgagaagatataagaatgataactcagtaccattgggcacccatgtgtttctgatatattaaaagagtctttgttaactggtccctttcatggtctgtattagtttcttattgctactgcaacaaattaccacaaacttcgtagctcaaggcaatacacatttattctcttacagctctggaggtcagaaatctaaaatcagtcagcggactacattccttctggaggctctatttccttgccttttagaggactcttgcattccttggttcatggctccttcctccattttcaaattgcatcactccaacttcggcttctgtcactgcattgcatttctgtgtctttcctgcttccctatttcccttattgttgtgagacttttccttagttcagctaaagatggggtctttgtcacatggccatgaaagattaggctcacagacaatttgaagggtgagaataatgggatttattgggcaaaagggaaaaaaaggggaacagggactcagcagagtgagagtccttctagtataggcttcctgcctcacagattaaatctcaggttccaccaaggaagaatagggaccaggctcctccccgctgcaaacagcatgagcttctgtggcttcaccccggtgcacactcctcccagtgcgcaggccagctggagtttctctaggaccccttctcacctggctgtctcattatgagaacgcttgtgattacattgagctcgcccaagtaatccagggtaacctacccatctctagattcttaacttcatcacatctacaaagtcttttttgccatgtaaagtagcatatccacaaattctgaggattaggacttcgacatctttggagagccattattctgtctaccacatggtccttgtagaattttgacttaagacaaagattgacagaactttgttcaagggtgtaacctagctctgaagccactacataccctgggggcatatgtagtttcagatgatctagagcaacactatccagtaaaactttgtgtgataatggaactgttccatatctacactgtccaatacagtagccactagtcatatgtgacttttgagcacttgaaatgtggctagtgaaactaaagaactgaatttttaatgttgttttaattaactttaatagccacatgtgactagtggttactatgttagactgcacaggcctggggactgacagcaaggaaagtttttgtcttggctttagctttgggtagaattaaaaacaaaacaaaaaaattattactgagattttgtggcaccagcctgcaactaggtttggagtctgaatatacattatgtgaatagtccaaaaagccacaagccaagaattttaatttaaagtagacctagttgtgcagagcatagtggctcatgcctgtaatcccagcactttgggaggctgaagcaggagagtcgcttgaggtcaggagtttgagaccagcctgggcaacatggcaaaacctcatctctacaaaaaaaatacaaaacttagcccagtgtagtgacacatgcctattgtcctagctactcaggaggctgaggttggaggattgcttgggcccaggaggtggaggctgtagtgagccatgatcataccactgcactccaacttgggcaacagagatagaccctgtctcaaaaattaataaataaataaagtagacctagttgtgtaatgcctcaagcaccaagaaaaatcaaatagaaatctttcatggaagaatgtacccctcccagacctcatggaaatcccacagagggttctgacaaaaattaattcacaatgaaaaatcacaatttacacaagaaaactaactaccaggaaggagaagtcaacaggaaaaaaaagacaaaatataaccagactttagatacagaaattatatatggaatataaaacagttatgctaaatatgtttaaagtaataagggtagagagcaaagagcaagagactatcaaaaatgacctggtagatttgaaaaataactaaacagaatacatagaaatgaaaaatacagtaattgacattaaaaacctcaatgaagctttatacatcagttgaaaataaattagtaaactggaaaataggtctgaaaaaaattacacaaaatacagcacagaggtacaaagagatgaaaaaagtaagaatggttaaaagacatggaggacagaaaaagaagattcaacatttatctccttagaattctagaaagaaaaaatacacagaatggctattattaaaaagccaaaaattaacagatggtggtgaggttgcagagaaaaagaaatgcttatacactgttggtggaagtataaattagttcaaccattgtggtagacagtgtggcgattcctcaaagacctgaagacagaaataccattcaacccagcaatcccattactgggtatatacccaaaggaatgtaaatcattctaggacacatgtacgtgtatattcactgcaacattattcacaatagcaaagacatggaatcaacctaaatgcccagcaatgacagactggataaataaaatgtggtacatggaatactatgcagctataaaaaagaagagatcatgccctttgcagggacatggatggagctggaagccattatccttagcaaactaatgcagaaacagaaggccaaataccacatgttctcacttataagtgggagctaaatgataagaacacatggacacatagagagaaacaacacacactggggcttatcagaggatggagggtggagtatgggaggagggagaggatcaggaaaaataactaatgggtactaggcttaattacctcggttatgaaataatctgtacaacaaacccctatgacacaagttttcctcaataacaaacctgcacttgtaccctgaacttaaaagttcaaataacaataataataataataataggaagaatattaaagtaaaccatggctgaatcttctccagaatttctgaaaacaacaatctgcagattcaggcctaagaaattccagataaggtaaataaaaaagaaattaatatctccacacattataatcaaactacagaacaacaaagacaaagacgaaatcttaaactagaaagaaaaaaaatgatcatgaacaaaagaacaattagactgatagctgacttctcaataagcaatgatgtaagccagattacaatatgatgttgaaagtgctcagagaaaataatttcatcctaaaattatatattctttggggaataaaggcaaaataaaacattttaatataaaaaatatttaaagagtttaccaccaatacttcctcactaagtaaggaaaattatccaaaaagcaagttctgagatacaagaaagaaaagactttggctaagaaaaaaaaagttaagcatgtgggtgatattaataatttctaatttgtgggattaaaaaaagacaaaaagcatggaatttaaaggctttacaatagcaagtcatgttgtcatggattagaatcacagtattctaaaggtccccatattgtttgaaaaggggacaaatatattaactctaaactttattaaattaagtaagcatgttaaaattccaagggcaaccctaaaataataggaaaaagaatgagtatcttccaaactgatagaagagaggaaatggaatgaggaaaaataaaccttaattaatttaaaaaagtcaataaagcagcaaaaacacagcacagcaaaacatggtagaaatggaacatatagcccaaaataggacaaaaataaataaatctaaatatatagctttttctttaaaatacacttttggaaattttaaaaacatatttttaaaggtttttgtttattttattcattaaacaattttatttattcatttatattttaaatttcaatttttattttaaattcaaggggtacatgtgcaggtttgttacctggatatattgcatgatggtgaggtttggggtacaattgatcccataacccaggtactgtgttgtccaggctggtcttgaactcctgggctcaagtgatcctcccacatcagccagacagaatctggctctgtcgcccaggccggagtgcagtggcacaatctcagctcactgcaacctccatctctcgagttcaagcgattctcctgcctcagcctcccaagtagctgggattacaggtgcccaccaccacaaccaactaatttttgtatttttggtagagacggcgtttcaccatatttgccaggctggtctcaaactcctgacctcaggtgatcctcccgcctcagcctcccaaaatgctgggattacaggcatgagccaccacacctagctctctcagcctttttaaaagagatgaaattacataaaataacaattataacaatgtatttttatgttcataacctatatagatgtatatgtatgtatgacaataatatcaaaaagagagggaggcagtgaagctaggtaaagtgtctatatttcactggaactcagtataaatctgaagtagatactagtaagttaagatatatattgtaacccctagagaaaccactaagaaaataactcaaaaataagtaatttttaaattatgaattaaaatgttacagaaaaaaataaccacctaatacaaaagaagatcatcaaaaaacaaaaaaggtatatggcatatagaaaacaaaagcaaaatggaagtgcaaatccaaacatatcgataacaacattaaatgattatagattaaacaatctaatcaaaaggtaaatattgtcagatgagatttttttaaaaaagcaagatccaacaatctgctgtctacagaaaacaaactttatgttcaaagatgcaaataggttaaaagtaaaagaatgaaaaatgatatgtcatgcaaacaacaaccataaaaatctggagtggctatactaatatgaaaaaatagactttataacaaaattaattactggagatgaaacagacagttcataatggtaaaagggtcaatctgtcagaaagatataacaattttaaacatgtatgcacctcacaacagagccccaagatacatgatgcaataactgacagaatggacacagaaaaaggaagaaatagacaaacagaatattacattctccagaatgcaccataggccaggaataaaatcatataaaatatgttctctgaattgaataaaagtagaaattaataacagaaggaaatttgggaaattcacaaatatgcagaaaataaactacacatttctaaataactaatgggtcaaagaataaatcacaaaggaaattagaaaatacttcggatgaatgaaaatgaagaggcagcataccaagaagcagctaaagcagtgctcagaaggaaatttgtagctataaatgcctatgttaaaacaaagaaaaatctcaaattgataactttctactttaagaaacttaaaaaaaaaaaaaaaagaaaagaacacactaaacccaaagcaggcagaaggaggaaataacagattagagcagaaataagtgaactagaaaatagaaaatacagtaaggaaaaatcaataaaaccaaaaattgattctttgacaagatcaacaaaattaacaaaactgtaggtagattgactaagaaaaaagagagaagactcaaattgctaaaatcagaaatgaaaattaccaccgattttacagaaatagaaaggattataacagaatgcaatgaacaattgtacgtgaacaaattacactacccgcatgaaatggacaaatacctagaaacacactaaataccaawacttaagactcaagaagaaaaagaaaatctgaatagacctacaataattaaacaaattggattagttatcaaaaaaaacctgccaccaaagaaaggcacaagactagatggcttcactgcttaattctaccaaatgtttaaagaaaaatcaaatgcaattcttycactttctttccaaaaaatgaaagaggaaggaacacttcctaataattctatgaggctgttattatttacagatttcaaaacttactacaaagctacagtaaccaaaacagaatggaagataatatttgcaaatcatatgtgatatgggacttgtatctagaacatgtaaagaactgttacaactcaaaagagagatgacccaattttaaaatgggtaaagaacctgaatgaacatttctccaaagaagatatacaaatggccaacaagggcatgaaaagatgttcaacatcattagttattggagaaatacaatcaaaaccacaataaaatacccctgcacacccaccaggatggctacaatcaaaatgacagataataacaagtggtggccgggcacagtggctcatgcctgtaatcctggcactttgggaggccaaagcagcagatcacttgagctcaggagttcgagaccagcctgggcaacatggcaaaaccccatctctacaaaaaaaattagctgggcatggtggtgtgcacctgtagtcccagctacttgaggggtggaggcaggaaaatcacttgaacccaggaggttgaggttgcagtgagccaagattgcactgctgcgtccagcctggatgacaaagtgagaccctatctcaaaaaataaaaaaataacaagtggaacaaagatgtgggaaaacgaaacactcatacactgcccatgggaatgtaaaagtacagctgctttggaaaacagtttggcagttcctcaaaaggttgaacatagagttaccttatgacccagcaattccactcctaagtatatacccaatgaaaacatatgttcacacaaaaacatgtacacaaatgttcgtagtagcattgttcatattagctaaaaggtagaaataacccaaatgtccatcaactgatcaatatgtaaataaaatgtgctatattcatacagtggaatattatttggcaataaacaggagtgaagaagctgaagaccacatattgtattattccattcatgtgaaatgtctagaataggcaaatccatagagacagaaagtagattagtagctgccgagggcaacattcaggggggtgagaggtgggtaatggagaatgactgctaataagtattggtctattttaggggaaaccaaaatattctaaaattagattgtgctgagagttgcataaccctatgaatgtactaaaaggcattgaattgtatactatgaatgggtgaattgtggggtatgtagattatatctcaataaagctattttttaaaagatggtagtggcttcaactaggataatatcagtgtagactgtgagaagtggtaggaatctgtatgtattttgaaggtaaggtgagtaggattttctcacatattgtgtgtgggatgagggaacacaaggactcaaagatttgttctgagcaactggaatgatggcgtgagcaactgagagaatgctgtgggaggtgcagtttcagatgataaagagttcagtttggacatgttgagttggaaatgtcaagtaagtagaaggaaaaaagataaatgaatgtggatggatggatagattgatcctgatggtaagttagactagcattacaaaattgggagttaatatatgggtagactttaaaactatgagtatggatgagatcaccaaagaagtatgtatagcaagagaagagaagatatctagagactgatccctaggacagtccaacattaaaatgttggagaaatgaggaagaactagcaaagaagactgagagagaataaccaatgaggtaagaggaaaattagaagagtgtgttgtcctcttgtgaagaaagtgtttcaaggaagagggagtggccaactgtgtcatatgctgctgagaaatcaagtaagatgagaactgagaattgaccattggatttagcaacagtgtagtcatgggtagccttgacaagagcagttttgatggagctaggtgaaaaggtctgattgatatacatttaagaaagaatgtaaagagataagtctcatttctatacaacagcaataaaaatcaaaaatgcagtttaaaaatataacaataaaaatataaagtgtctgggaataaaccaaacaaaaatgtgctaggaagaaattataaaactttattgaaatggagaggccaggcacagtgtcttcatgcctataatcccagcactttgggaggccaaggtgggagaatcacttgaagccaggaatctgatactagcctaggcaacaaagtgaagctatgtcttgttcacaggtagggagactcagtattgtaaagatatcctttgcaatcaatatatagtctgaatcaatcaatatagtcattgtaattccaataacaatcccacagggtgtttttatgaaatttgacaagctggttctaaaattgacatgggagtgcaagaaaagccaaggcattcttgaagagcaacaataacttattcttatcagatattaagatttatcatacagctatagtatttataacagtgtaatattggtgcacaggttgacaaataggctaatggaacagaacagaaaacctgaaaatagacctatacctatttggaaatttgatatctgacaggtagcattgcagatcggtcaaggaaagagtgaattctttaataaatcatgttggggaaaaatggttatccatacagaaaaaataaaattagattcctacctcacaccaaacacaaaactcaattctaggtatattaaatacttttagaagaaaacatagttcagtggttctcaacttgcagtaccaccatctacagaacatttgaaaatatatagagtatgttagattgttatgatgacaggaatagtgctagaggcatttagtactcagggtctagggatgctaggtgtcctgagacgtaagagccagccccatattatttgtcctgccccaaatgctagtaacttccctactcacaaagaaatactgatacaggataatttctctagtcttgggataggggataatttctgtaaaaaaaaaacataaagtaccgactataaaagaagagagtaataaattcaattaccttaaaatgaagtggctctgttcacaaaaaaaaagaaagaaaaaaaagaaaaaaaaaccctaaagtgaaaaagccacaaagtggaagaacatctttagtactcatataactcacattcagaatctacaaacttctatataccaatacataaaaagacaatcccgctagacgtggtggctcacacctataatcccaacacttagagatctcggtcgaggcaggaggattgcttgaggccaagagtttgagaccaacctggtcaacatagtgaaacctcatctctaagaaaaaaaaaaagaaaaaaaaaattatcaggacatggtggctcatgcctgtagtcccaactactcaggaggctgaggtggaaggatcacttaagcccaggagtttgcaactgcagtgagctatgatygcgccactgcactccagcctaggcaacagattggagacctcatctcaaaaaaacaaacaaaaaaaaagataatccagaagaaaagcaagtaaaagatatgaacaagcctttcacagaagaggaaacctgaatgaccaagaaacatgaaaagatgctcaacctccttggtaatcagggaaatgtaaattaaaaccacaataaatgacgaaagaaaccaacaacatgagattccattttaatccaccagattggaaaaaaaataatgtaatttaaacaacactaagtgttagtgatgatgtggagcagttagtgaagacttctgatgggagtatatattaaacaaccaacttgggaaacaatttggcattatctaataactttcaacatgtgtatactttacaactcattaattccacccctataaatagacttgagaaacttgcacaggtgtactataaagaaagtttatagcaacattgttcagaatagcaagaaaactagaaacaacagatatttgtggtatggtaacacagtgaaatactatgaaacaattaaaatgaatgaactgatgccaataacaatgtgaaagattctcagacacataattttgtgtaaaaacaacttcaaaagaagtttagtgtgataccaatatttacagttcaaaaccaagcaaaactaaaaagtatcttgttaaggatacttgtatatgtgggaagactaaagaaatgcaagggagtgatttttagaagctctcaatagtggcttcctctgggagaaaggcagggtacctctagggtggaggaagtgtgcagggagcatcaatggcactggtcatgttctattgctgaaggtcaatggtaagttcacaggtgcttattctattattagacttcataacttacgtatgtattaagtattttacatgtagaaattacatacaaatatgatttacatatattaagaattttgtatgtatcaatatcatttttaaatgaagaatggagaggaatactctctgacactttcagagtaggagctgcagaagagataaagactcttataatggaaaacatttaaaatctactctcagcaattttcaagtatacagtgtgatatagtttgaatatttgtccgcactcaaatctcagtttgaattgtaatccccagtgttgcagatggggcctagtaggaggtgattggatcatgggggcagatccctcatgttttgatgccaccctcgtgatagtgagtcatgagatctggttatttgaaagtatgtggcacttccccccatcactcttgctcctgctttcaccatgtgatgtgccagccccccatttgccctctgccatgattgtaagcttcctgaggcctcatcagaagccaagcagatgcctggcaccatacttccagtgcagcctgcaaaattgtgagctaattaaacctcttttctttataaagtacccagtctcagatatttctttgtagcaattcaagaacagcttcatacacagtacattattgttgttgttgttkttgttgttgttgttatttgagataaggtctgactatgttgtcaaggctggtctcaaacttctgagctcaagtgatcctcctacctcaacctcccaagtagctgggattaaaggcacacaccaccatgcccagccagtacattataattaaccatagtcattgtgctgtacagtacatttccaaaacttactcctctcatctaactgaactttgttccctttgaccaacatctccccactctcctccccacagccctgaaggatatgttaatttgcttgatttaatcctttcacaatgtatgtatatattaaaacatcacatcatataccataaatatatacacttttgtcaacttaaataattaactttttttgaaagaaaaaaatttttaaaaactcttttaagaggatacaacccttcacagcagcagtgttgcctttagagacacagtctccctggtttccccattacaccccattgagccaaaggcaggctgcagacagcaacatggctcttccccagctaggtcaggagtacaggaaaaagcatgccctctcttatgatcaagggtgtgctcagtcactgagcctgccaacattgtcatgggatagcaattgaaatagccaggggaaaaaccaacagactttgccacggtgggtaaattttggggtatctgaaggtgggaagtgagagggtgggcagaaaccactgggctagtagaaagatacctagtttctttctaatggcatcttctactagctcgtgtgaccttgggcaattgacttcccttctccacactcaaatttctcctcagtcctcttcaaggtttaactagaacacacattaagatcatttccagcctgaacaccctaggattctgattttaagtctgcttaaggggaaaacagtttgcatatttacactcctagtctccaagttagtgagtaactaagctcctctctattgttcagagcctttgaaagtattgctgaattggctctctggaagtatagaaaaacaaacccacgtgcatctacaaatggccattcttgaataagaaactcccattcacacaattagccttgagaatgtagatagaagtttaagcaaaactgtccttcaagtctgtgcagtctgtccttccycctccagactgcctttgattacagtgcttcctgtctctctgtatgtagccctcatgagttcttccttgcgtacgcattttgagggggaaaaaactttcyttgtcaagttttcctcacataacctcccttacctctgcattttccctgtgctttaaaacagccacagtagctaagaagagacttcagtatgcaaaatgagctttgtccctgggagatggactaagggttaaattaaagggacagctgtctatacagctggctagaatgagaagagtgctaggcagcatttgggctggctgcctctcacttttattccttcccaatttttgtctcccttccacccctctggccaggggtgctgagcagcaaactgctcagacagagctcctgggcattttccaataggaagctggagctgaggtgacctaacttccttatgtcctaacttcccccagacaaaagatgtttaagcctcaaatttggaactggaaaggaaatctaaaatgtacaaactactttttcacttgcagataatcaccctttccttcttccaaatcttctgaccttgtttaaaattaatcttttgctcttagcacttttttccccccttgaactatagttgttttgttttgttttttagcagcacttttgaggaactccttttttaaaggcaagagggactatgtgttactctgggtgagtcactgttctttagtcgatgctggtgagaatctcaagggttgacaaagattgccaagggtggctgcagtccagcacccaaatgctcacataatttgcccctgtttccattttatggtgaaaataatcaaggacaagaggaggaggggatttatgagaataaataagatactgtcttacagccaaagcaacattcagattctcagctggcagaggaattcttgagactgatctgtagtgaaagcatgagcaaactgctaaatggaatgcaaagagaaccctgggcttaatcttcgttccaggcagtctacagaggcgtctcagagcagtactattcctggaaggcaaagtgcttacccacgcactgccccgcccccagcgtgagaaattcagggctccataactgtgccagcaccctggctcttatttccgcagtccagttgctttggtgaaataggagtgtacgctgcctatccatgaaagggcaactctgaaagcgatttataaactgtaaagtactaggagacgtcaggtggccctgtcactcacccatttctattgtacgctgcactctttcagttgtcttttaccattattggacaaaaaccacagaattttgtggtgagaggtcaggccctgcatataatcaatcatgcacaagtcccaagggatagaagcataaatcggccttaattctggatttccccgtctacacatggagagaatttgccagtcagcgacctcacaaagacatcatagaatggtcaagaaatgaccctaagaaagctcttggtggggggattgctttaaagccttttgaaggaaagactctcaattccaaaatgccattattatttctgcattgaagtaaaaacccttgtgtttatatagcctttgattctgatgtcagatatctgatgactccccacaactctgctctgaagtgaggagaaggcagtcatactggagtctctgtatccagtggcggggctctgcacagagtaactggactaggaagatcaaagagccaagccccatccactttgcagggtgggtcaaccttgggccatattaaaggacttctacctctggttagtacctcccctaggctctacatttagtaaacaaaggaactcgaaatttgtgatgaaattaaataaaaaaacaagaacttcatcattacattcatccatctgcccattgtttattttgagtgtgtgcttaacagcactttccagaacaaagtaatccctaagtagagacaaagacgcctctaataccagggcatcggggagtggggggtgttacattccttccctccccatcctccttttcccaaagcccatccagctgacaggtgccagaagcgaagaaatgttagcaaatgttagtttccagccccaaagaagctgtcacaaaagggagacagaacaaggcagctcataaaatccttcaactgagggacgtagcgagacctatctaattacataagattagaaacggtttaacgagttgagaatgtgctacatgtggaatgaaagaaaatgacacctctggcaccctgtaatgatactgtattgggaggaaagcacaaagggtttgttcacgctatcagtaacaccagtttttcctcatccaacattttagacacatctggttttaatatggtggtctaagtgaagtaagttaacttttcacccactgttctggccctccttttctttcttcactgtacaattccgtttgtgttggcattgtccctctctcacccatgcctcccaagctaacagaggcagaagaggattacactgagaaactttgcttacctctgggctctccagtattttactgctcaaattatactaacaatgatttggaagcaagactagtctttgtttcagctaaattcaacggattttagctttgaccttctgcctaatttattaaactaccaacgctgaataagaactccctaagcaatcaatgagtcacagaacattcctggattttgaaaatttgggaaagatcatctccattactcttaagtagaatgcccaggaaatctggtatttgcccaactggtttctagctaacatagtattaattgacaattttgtgcctgtgttagccaaaataataataattttttaaagtctttggtgattatatgctgaagaactacaagataggtgtatttccagtaaaagtagaactttcaaactacaaaatgagttcccttctacacatctcttttcagaacagaaaaagggttttattctcccacacccagagaaaagatagtagaatttttcaaatggctactattaaatgccaaagtttggaatttttttagtgctttgatataaataatgtttactcattttttaccctctttagatttgtgcctcacagcacttttacaaacagcaagtgtataattctaagctagtaggtactgtcgactctgaatacagggtaccatttgaattgtgctcaacactgactctttgggatcctttcctgtgttctgasttctctctggagtacagattttagttggaaggagaggggcatgaatgatctccaggtcctctgaaagatgtgaagtctttcaggtggcttctggtgtattttttcctccatctgaaagcagtccagtagggcacttctgtagctaatgccttaaccccaagaagtgactaatagtgagacatttgtgccacctggtaagctggcaggggtggatggtttaaggcaagtgtaatattcagtgcctgaaacatcacagggatgtctgtctgtgtagagttggtacctactattgtggcatgaagggactagcaagaattgctatatatagacttgacctaagagatgtaccatttttactacattcagagtcagcagccctttattaagcacatactatgtgcaaagccttgttaagtttctgtgaagttctctgtaatgtattaatagatttctttttcaaagtggtcagggaatttcagcaatcatttactgactaccgctatatgcaggcattgtgctggggataccaatatgaatcagaggtgtgccctgatttatggagctcagggtaaagtgtgagaaagaaaaaattatggtacagtgtgagagtagaggttccttgcaaagagctttgcgaatgtatagaggggaatgattaattcgctcaggaggtgtcagaagggttcacaaaggagatgatatttgagctgtttcttaaagagagggtagaatttcaccaggcagacaggagagggggaagagaattccaagcagagggaacagtgtgtgcaaaagctcattaaagcatttagagagttctttttaccatcacttgagagggcaaatataagttgtactaatgttgagtttggattttttcctcatgattacattgccatttttaaatacaggacatgatattttaaggcaatgacaagaaaaggcctgatacatttgaaagctctccttattaagctgtgatgctttatctagttagtgccttgcacatatagcaggccctcaataaatgcttactgaatgatgagttccctatctctttccatttataaattactgcactgtcaaggatcagcttacaaagcaaaacttctgcctgtgagttaggaatgggtattcacagttctgctttctgtcaccccagcctcccctactcttgtgaagagtgactctgccactgggccttaactgtgtttctgagaagtggggaaaactgctcttgctttgagtcctcagtaacacagattcctacatggagggcctctacatcactgaaacccagataagtgccatttgaatgggacagtcctcatgttgatgacataggagttgatgtccaaggaactttagtgatactggctaatacaggtacacctcacattttaaattttatagtacagcctaaatgtgattgatcaaacattttctatggcaataataaagatatgagttgtctgtgctgaacagccttgacagcaaaatatggtactgcctgttctgtttttttaaggaagagaagataaacttttattatttttataaattatgcaataacctttagggtaacgataaatttttgccttgaaaatcaccagggaatagatgacagagaatgcagttagacataaaccatttgcaaattatatgcaagtacacttgtaacccttttattgggtgtctggatccagtctttgggraaattcccatcagggaatcttgtttcattgtgactctaaaacatattaaaratatacttcttcagttccaaatcttggcagctatgtgactggctctttcaggcctaatctctatagctacacttttctggtggccactataccaggccacagaatgtaatgtctttcatcctctgagctacactgtgaaattatcattccacaaatagtcattgagtgcttccttgagccaagcacaatgctaggttcagtgtgcctgaagtaaataaaatagctatacactatagggtgactataattaacaacaatttcttatatattttcaaatagctagaagagtgaattttgaatgttcccaacagaaagaaatataataaatgtttgatatgatggatatgctaattatcctgatttgatctttatacattatatacatgtatcaaaatatcacactgttaatgggtacaaaaatatagttagaggcaatgaataagatctggctatcaaattagccaacagggtgactatagtcagcaatgatttgttgtacattttagaacaactgagggagtacaactggaatgttcataacacaaagacatgatgaatgtttgaggtgatggataccccatttaccctaatgtgatattacacatgtatgcctgtatcaaaatatctcatgtactccacaaatatgtgtatgtgctatatacccacaaaaattaaaaattaaaaaaaattaagggaaaaaagaaatatcacactgtacccataaatatgtatagttattgtcaactaaaaaaataataaaaaataaggcatccacatccctgccccccatggtaccctcagcctggtaaaatagctcataatctcctttgggatcatggtcccttttgaaaatctgattccgactgktcttatattacttaaatattagggtggcagcttcctgtctccctaaagaaagccaagaacttttgtccctagaacatgggatcttgttaaatccagtataggaagtcattcttcctagaggttaagctttgttttcttttggagcctgtggctgggtaaaaagaacatgagcttttgagccaaacaatttggggttctgatcctttaactagaagtgtgatcttgagtaatttccccagtctctcagaagctcagtttcttcatccctaaaatggcgatcctcattatccaccttgcagggtggctgtgaagattgaatgcttctgtgtgtacaaagcacctctcataaggtcagtgctcttatcagggctagtaagtgagaaagccrtattttgaacccagatcttgctgactcaaaacctaggctctctgcttcctcacaaagcctttgaaaataccggatcatatttaagcctcacaaaactccataatggagggaagaaacaaaacagctgaagatgctaatttgtttcgagacacttaggatatctgtgacaaagctaacaccaactccagagactcagtatccttttttagctatgaatgctcagcgtgtctccctgtgcagttgtgtccattcctttcataagcatttattgcctaccactgtgtgcctgacttggtttaggtgcttctggtgatttaagaggcatgatccatgacttctaggaagttatagactagtggaaaggcaaaagctgcacctgacaaccaattagagaaaaattacacaagacagtgcataaacaagtattaataatgtagctaaaactaattgtattagtcagctcaggcagccataacaaaataccataaacttgatggtttaaacaacagaaatttattttctcacaattctggaggctggaagtccaagatcaaggcaccagcatggtcagtttcttgtgaaggtgcacctcatggcttgcagtcagccaccttcctgccacattctcacatggcctttccttggtgtgtttgcagagagaaaactcataaggacactaattttatcagatcagctacccccttcaccatgaccttatttaaccttaattacttccttgctccaaatgcagccacattaggggttagggcttcaacgtgtgaattggggtaggaagacacacaattcattccatagcagtgtgtgtgtgtgtgtgtgtgtgtgtgtgtgtgtgtgtgtgtaatcactgtggcatttgtatagacaaaggattacagagagataccaagagaactagaaaggccagttaggaggcctttgtggtcctctagattccagatccattttggaggtagaccaacaagacttgatgaagtagatataggagtgaaggagagcaaaggcttaccaaagaccccaaggctctttcttgggcaagtgggtgaatggttgattaataaagggaacactgagggaggagttgtggggtgggacttgggggatcagcgcatctagactggtatccctccagtcttccacccataatccatccttcatatcagttattttgtaacagttcaactttaatcatgttatctacctgcttcaaatacacaaacacacacacacacaccctcccagaacttataagtctgaaattcttagcggagaacacaagatcgttctagattgggccctaatctatttttcccactatgctatccctactcctgccctaaactctgattccactatgcctttgaccaaggtacttcttctactaggaatatccttcctcctacttgcctgctggatgaagtcctactcttccttcaaattccaatccccatgtcatctgtctgtgaagtcctccctggccacccctcccctccatagtttatcactcctttccctgcgatcctataatatctgacacacatagttaacttgagaccttattatattgtattgtaattcatttactcatctgtctcctcaactatactaaattcaagggcaaaaactgtctgatcctcccctgcatccctaattcctaccacagtccctggaaacaagcaggtactcagaaagaagaagtacaacaagcactcatggagtgattactatgtgcctggcactgttttaagtgctttagatgcgttatttatctgtatcctcacaacacaacaactattattatccccatttcatagatggcttgcccaagttgacagaatkagtaagtggcagggctaggattcagacccaggcagggtggctctggagtctgagctcttcaccactaccctacacaacctctcttgccaccccactgttttcctgtctgttatttacttggagcctgggagctgctttgatgatgacggcagggagtgagggaattactctactaaaaccagaggctatagcaggaagagagctacagaaacccgccctgctggcctccatctttccctttcctcctgctactaaactccttaagcacgagatagcacatccttctgcagggagaggagcagccactggaggaagccaaaggatttccctcttccctccaagtctcacttttctaccctacatggctcccagcttctccctgccccaaccatttgtagccaaggaactaggcttagctaacccatgggaactccagttcacacgcaggcttaaattgagtgtgtgccctctaatatccccagtggggcctagctcattgtgctctgcctatgattttgttttgttttcttttgtttttgaggaagagtagagttttcggttttgattccctcaagaaagagaggtccctgctgttctactctgaactagagctagttcagctccagagtggagcccctcaggctaatatagcaaatagaaagagaaggtggcaatcagggcaacaactgcacagttgtgtccattcctccacttcgcattccctcagcatttagggacttggctttgtgctgttttgtttagattttgagaatgttctgaagagtagagatgacacagggtaaagatagggttcctgaagccggatacacccaggtttggagtccagcttcaccacttactagctgtgtgaggcaaggaagttatttaacctgtgtcttatctgttaggttcctcatctgtcatggagctagtatagtacctgcctcataggatgcttgttaggatttaatgaattgatccacatgaaatgcttagaactgtaccgggttcataagtgctctgtaaacattagctgatactattttttaaatatagtatagtaacagagaatataacaaacacacttattcccaccattcagaattaaaatgtgttaagattttatcttatctttaaatccttaaaaaaaaaatcatacataagttgaatatcctgtgtccttcattcccagtcctattcctctcccaatgcccccaaggcatccattgtcataaatttgatgtgtatctttccagttcattttcaccatgatcataaacaagatttggaatttgggggaaatgattttttttaattgggacaaatagtaccatactgtacatattgttttgcaatctgcttttttcattcaatattttttctccttttattgttttattcagtgaagagacattcaatgttgtttctaagatctacccacatacatccatttcaggccattaaactgctttatagtatctcatcctgtggatattctgtgttttatttaaccatccacatctttatggacatttggattggtcctaattttttaccaccacagtccattgcaatgagcattcttacacttggtccttgggcacatgtgcaagtttctgtagaacacagacctgcaaatggaattgctggatcatgaggtctgtgccttttcaattttactagacactgtggacctggcagaggcggtagagtacagtgagtaagagtgtgacttgaggtctgatatatctaacttcaaatcccagctgtgttactccccaaactgtgtgactcagcaattctttgtgcctcagtttctctatctgtaaaatgaggagaacagtatatatttcatagggttgttgtgtggattaaatgggataatgcatttaaggtaggctactgagcaaaacatggtaagctattattcttttttattatgtcttatcacatatttccccctcaaatttgagagtagaccttttgtaaagtgtagatatgtgaatataaaaaatactagaaagacattcatcaaaatgttaaccagtgttggaaataggagtgatcttttttctttgtgcttttttattttccaagttttttgtttgcttgttttttcgttttggttttggttttgagatgaggtcttactctgcagacaggctggggtgcagtggcgtgatcatagctcactgtagcctcgacctcctatgctcaagttatcctcttgcctcagcctcccaagcagatgagactacaggcatgtaccaccatgcctggttaattttttaatttttttgtagagacaagatcttgctatggtgcccaggtgatctaaaactggtggcctcaagtgatcctcctgcctcggcctcccaaagtgctgggattacaggcatgagccactgcacccagccttttccaagtttcctacaaatgaaatgtattaactttgtaagtaaaaaacaaaatcacaataaatgcaatttttaatggaaaagaatgtaaagtaactgagatttttggaaaaaaaaaaagaattttctttctggtgagcaggagctctgcaagaatagtaaaagaggtcctaagaaatagctttgtaaaagttgaaaaacaatgtaaatgtttaccagtagaagattggcaacatatgatacatgtgaaagaatctccaagataaggtatctaaatgaaaagggaattacaggacaccgtgtacaatgtgttttcttattgtatcaaaatgatatttttatgcttacatatgcagtctgtctcttgaaagagttacaaaaacactggtaagggaactgggtatctaggacacagcaaggacttattcttttacaaaatatccttttctgcctttggaatttttaactaaatacatatatyacttactcaaactttttcaatacaatggttttaaagtagtttatgctagaatgtaacagactttttgcaattattgtcagtatctcctcaactacctttaatctagcctccaaagttagggcgggcaggytaaattggggcccttgtttgccctggtgtctggctctagagtctatcctcttaccagctggttgtaccccccaccccaatgcaagaatgattcaaaagttaaccaggcacagaagggtggaaagtgattccagcagagcataacagcctgagtagagtggatgcatgtgggtttctgtctgtgtgcaactacaaacaattgtgtaaaaattgtaaggtggaaaatggtaagagatgcagctagagaggtgtttggaggccaagctgtggagccaactctttattagtcatgctaaatagcttagaccctcctaccaaagttgtggtgtccctaaaacttttacagtaagggagtaacaagatccattttgtatttttgaatttacttaggctgctgtgtaaaggatgaatttgagagggacatgactggagataggaagagcaactcagaagctgttaagagatgatgcaggcctgaatttaaaatgtgagctaggatttgaactcaggcctgcctgactccaaaaatcaaatgttattatatttctccatctaacacactgcctgaagaaatgaacaattgagtttctttgtgccagctttccccacactgatgccagaagtacaccagcagatatatgtctttatctacactgagacaaaggggaaaaggctacctcttttttttttttttttttttttgagatggcatctcactctgtcacccaggctggagtgcagtggcgtgatcttggctcactgcaagctccgcctcccgggttcacaccattctcctgcctcagcctcccgactagctggaactacaggtgcccgccaccatgcccggctaattttttgtgtttttagtagagacggggtttcactgtgttagccagggtggtctcgatctcctgacctcgtgatccgcccgcctcggcctcccaaagtgctgagatcacaggcgtgagccaccgtgcccggccaaaactacctgttaataaagcctgtggattcacaaaagcaattctttgtgaagaacgaaacctcaaagtacatggtttggctatttttgtcaagaattcttgcttacaacatcttggggaaacttccttggggaaagagtaagtttgtatcctgccttgttctttaaatattttgctttactattagtgtaaattatccaatatagtttatacctcaggtatagaaacttttagagaggtgtatcatccataaatccatgaattcccaatttcaaaaaaccagaatacaaatagcactgtacaattaatgcaattatacattttaatctttgattattcagaagggaattcatgaatctggggatctcaaggtcaatgttagaaacatcattatcataagctcctaatagggcagagtttcttaatgctgtatccccagtgcctagtacatagcagactttcgatgaatgaataagtgaatgaatgatagaggactgtagcagtagactgggtagacccttctgatcctatagctttcctaggaccagtttgtatgcttttcttttacatccttctcctataagtagaatacgaaatagcaaggctgagaagattgatctatgggagcttttttagggggagagggaaaaatcatctaataactcaatcgcttttaaacagctttagcaagatataattctcatatcacaaaattcacccatttaaagagtgcaattcagtgggttttagtatattcacaaagttatgcaaccattaccactacctaattctggtatgttattatcccccctaaaagaaatcccatgctcactagcaatcaatctcctctcccccgaccccctggaaacaaccaatctactttctgtctctatagatttgctattctgaacatttcatatgaatggaatcctgcaatatgtggtcttttatcactggcttctttcatttaaccgaatgttttaaagggtcatccatgttgcagcatgtatcagtacttcctttatttttattaccgcataggagctttctgagccagtaatttgtggtttgggttatcacagcgtttcctacatttggacaactgagggaactcatctgaaactgaaaggaagccagcatgaatacaacctagagtgaatgagattacagccaccctcatctttggcagtggcatatttgtgctgagccaaagatctgtcttaataggatggcaggcccaagttatgcgttgtgacctcctggtggcactggtctagtctaggaagggctcataggtgctggtataacaggatgaggcaagtgcctcatagcttgtgtttctggcttgggcagagcttgggtgcaattcctcgtcttcagacatctgagaaaagtatgtcgggatctcctggttgcatttgttctgtttgccagtgggcagagtacactgcactgtgcagacaggttagacagtttattgtaggctgatgaaagcagattaaaaaaccatcagcttggtgggaaactagctcagaatccaatccaaatgtcagatgaaatatttacacagccaggagataaaccaagggaaacagtgtgccctttgtgtgtgcttctgagtgtgcaggcacacacagagctgctgaccatttgtcaacttccaagatttattctgttgcttctggcaagggacagcctaatgatttaatagcttgtcaacacctacacagagaaacaaggactggcacttcctcatttcttattttctttgctttaaataggaatttctattccaagtcactggaacctggaaatcagactgtcagatttctcttgacttgagtgcacagttcctgaatctgagcatgatgaatgttataactttcctattatacaaacacagggttgctaccctttcagaatgacccattgagttcatatcctaaagcttgagtgtttgcttcagaccattgccatgagccaatttcaaatggagtgaaactgttttgtttctgtcccatgaacctcttgagttgaatgcctgcttgagcaatccagtgcctggttgccacatttacatttgagatggagaagttgtttagaggattttagtgcagaagattggatttcgtatgcagagtattattctccaggcatccttgggcagttgtgagttccctgaaagaagagaccatgtcctcttcaactcagcaaaccccacagtgcctagcacagcacctagcacactgtcatcttggttaattcattttcaaacaattccaccaagatctatgatagaatgacaaccagagggttatattttatattagaataatgccttctgtatactgggtctttatcccaaagacaggtagtatagcaaaatggtatagagctctacttctcaaagtttaatatgcatatgaattacctagggcttgttaaatgcaaattctgattcagttcctccaggctgaagcttgagattttgccattcttgcaagctcctgcacgatataatgttgccaaaccaggtaccacattttgagcaccaagaatctagagctatgctatccaatatggtaaccagtagccactagtgattagtaagcatttgaaatgtggctagtccaaattgagatgtgctgtaaatgttcagtacacaccagattttaaagacttagtaagaagaaaatgtgaaatatcttattagtaattttatattggttatatgtcaaattgataatattttgaatatgttaggttaaataaaacattcttaaaaataatttcacttgttttttttttatttttattgtggctactcagaacatttttaattatatattggctcacattatatttctactaaacagcactggtctagagtaggagtagcaaacttttagaataaagggctgggccataaatattttacgcttttcagaccatatgatttctgtcccaactactcaattctgctgttgtacacaaaagcagccatagacagtatgtaaatgaatgagtattggttgtgttccaataaaactttacttacaaaaacaagtagaaatggtagccttgaaaaccaacagcctacaatcatggtgaaaaccagcagcctggcagccaccagagggaacagaatatggactagaatgttggagctccttccaagcctcatttctgaacaattaatatttggcctgtctagtggttccttgaaagaccccacttgcaaggctttttttattaggcatgattcaagagtgtgctcagtgtgaaaaactttttccttggggtatttgtcaaaaataattagagacaaatgattaactttacagctgcctatggtaataggtaacagttgtggtgaacattaagctaaccaaaaagcttaaaagtaaatgctggggaatgagatgtccatatggagcttagaaaacctccaacaaatacctgggaatctaaaaggctatgcatatgcacaggatgataggcattcccaaggctgtgcacatgctcagaaaacacctaagaaaggccaaagttctcacctatggctgaacttcaagctctgtacaagtgaagtgctaaggcaaagttgcccccaacatacacacagagcatcttggtaaagactgggagacttactggctccatgaatttaagcaattctctgtacaatcattagctgacgactaacctaaccaagcagagacttctgtgaccccacgtgacaaagaatccagactttgcagaattaatttagaaaagccactaaacaggccaggtgtggtggctcatggttgtaatcccagcactttgagaggccgaggcaggtggatcacctgaggtcaggagtttgagaccagcctagccaacgtggcgaaaccccatctctactgaaaatacaaaagaaaattagccgggcgtcatggcgcatgcctgtaatcctagctacttgggaggctgaggcaggagaatcacttgaacccagaaagtggaggttgtgatgagccgagatcacgccactgcactccagcctgggtgacagagtaagactccgtctccaaaaaaaaaaaaaaaaaaaaaaaacactaaacaaataaacaccagcagcaacaacaacaaaactctggggagagggagaatttgttttccagagttaccgcatgatataattttaaacgttcaatttttaacaaaagttgtaagatatacaaagaaacaagaaaaggtgaatacataggaaaaaatatcaatcaacataaactgtcactgaggacatccaaacattggaattactagacaaagactttaaattaggtattttaaatatgtaccaaaatttaaaggaatgtatgacatgtctcaccaatatcaataaatatcaataaatagaaattatattaaaaataactaaatggtggccgggcatagtggctcacacctgtaaaaacaacactttgggaggccaaggcgggtggatcacctgaggtcaggagttcaaaaccagcctggccaacatggcgaaaccctgtctctactaaaaatacaaaaattagccaggcgtggtggtgggtgcctgtaatcccagctactcgggaggctcaggcaggagaattgcttgaaccttggaggtggaggttgcaatgatccaatattgcaccattgcactccagccttggcgacaagactgatctcaaaaaaaaaaaaagtactgaagggaatccttcaggctgaaatgaaaggatactagacagcaacttgaatccacataaagaaataaagaccaccagtaagggtcactacataagtaaatatcaaagtacaaatatatttttctttggaactcttttcttctatatatgatttaaaacacaactgcataaagcaataaatccactttgataagtgcacaatgtgtgaagatataatttgtgtgacaataacaacacaaaggagaggcatgaaaatggagctatatgggaaaaaagtatttatgtacttaggccattttgtgttgctataacagaatacctcaggctgggtaatttataaataagaggtttatttagctcatggttctggaagctaggaagttcaagaagcacggtgctggctttaacttggcctctggtaaggggttttgtcctgtgtcacaacacggcaaaaggtcaaagagtaggaaggcacatgcaaagaggcaaaatctgaggggctttataacaacccactcttgcaggaactaatccatttctgcaagaactaatccagttttgccagagtgagaactcactaccatgagaatggcatcaagccattcatgaggaatcttctctcatgacccaaacaactccaactaggcccacctcccaacactgccacattatggatcaagttttaaatgagttttggtggggatgaacaaaccatatccaaaccataacatatactattgaaattaagttgatattaatccaaactgtattgttaaaagttaagatgttaattataatactcaggcaaccactaaaaaaaaaaatatacatatacatatatatacacacacatacatatatatacacatatttatacatgtatataatacatttttatatatgtaaactaacaagaaaattaaaatggtacagtggaagatatctatttaataaaaaaagaatgcagtaatggaggaatcgagcaacaaaaaagcytaagacatggagaacaagtagcattgtggcatacatagactatgccttatcagtaattatattaaatgtaaatgattaaacattccaattaaaaattagagattggtcaaatggattttaaaaacataattcaactatatgttgttcataaaagaaatactttaaattcaaaggcacaygtaggttggaagtaaaaggatggcaaaagatatagcatgcatacggtaacaaaaagagagctggtgtggctatactaatagacaaaattataaatatatgtcacctaacaacagagcaccaaaacatatgcaacaaaaactaaagaagtgaaaaagagaaataagaaatttaacaataatagttggagatgtcaatactccattttcaataataaatagaacagctagggagaagatcaacaaggaaatagatttggacaacgtgataaaccaactagagcagaatatacattcttttcaagtgcacgtggaacattttctaggacagaacataagttaaatcacaaaagaagtctcagtaaatttaaaaggattgaaatcatacaaagtactttggaattaaattagatggaaaggaatgaaattagaaatcaataaaagaaggagatttgggtaattcataaatatgtggaaattaaacagcacactcctaatacaaataggttgaagaagaaatcacgttgcttcatggccttttggctaagttcaagtgtagtatctgtccttatcagtttaatatctgatacatcctctatctgaggacaatacattaaagggatttttggagcagggagatggaataaggactagtttcctccactccatgcatcaacctggtattgcagtacctccagaaatggtgcacccctcccaataagaaaaaaaaattaaaagaaaagaaatcacaaataaagttataaaatactccaagatgaatgaaaacaaaaacaaaacatgccaaaacttatggagtgcaatgaatgcagtactcagagggaaatttgtaactgcaaaggtctgcttaaaaataagaaagattacaaattaataacttaatctttcatcttaagaaaatagagaagagcaaactaaacccaaagcaagcagaggaaaagaaataataaaaattaggtggggcatggtggctcacacctgtaatcccagcactttgggaggccaaggcgggtggatcacctgaagtcaggagttcaagaccagcctggccaacatggtgaaaccctgtctctgctaaaaatacaaaaatcagccagacatggtggcatgctcctgtagtcccagctactcaggaggctgaggcaggagaatcacttgaacctgggagatggaggttgcagtgatccaagattgcgccaccgcactccagctctgggcgacagagtgagactctgtctcaaaaaactaaataaactaaaaataaaaattacagcaagaagaactgaaataaagaatagaaaaacagtagagaaatttggtgaaatcgaaagttggttctttgcaaagctcagcaaaattacaaaactttaggtagacttaagaaaaaaatgtctcaaattatgaaaatcaggaacgacagtggagatattactacccaccttagagaaataaaaaggagtataaagagccaggcacagcgtctcacgcctgtgatcccagaactttgggaggccaaggcgtgaggatcgcttgagctcaggagttcaagactagcctgggcaacatggtgagacctcgtctcaaaaaaaaaaagagcataaaggaatactatgagcaactgtatgccaacaaattttataacctagatgtaatgaaaatattcctagaaagacacacaataccaaaactaacaagaaaaaatggaatggagtatctgaatagacctaaaccaagtaaaakagattgaattaataattttttgaattcccacaaagaaaaccccaggcacatatggtttcactagtcaattctactgattgataccaataatggttgattttatttgtcaactttattgggccacagaaatgctcagatacctggttaaacattatttctggttgtatgtgtgagggtgtttccagaagagattaccatttggattagtagactaaatcaagaagattttccttcttagtatgggttggcatcatccaatctgttgagggcctgaatagaacaaaaggtgaaggaagaattatctctctctcttcctcccttcccttctcttccctcccttcccttccctccccaatcctcccctcccgtctctcaatgactgcttgagctaagatttcagttttctcctgccctaggactgagatttacaccatcagccctctggttctcaggcctttggacttggactagaacttacaccatcatttctcctggttctcaagccctcagactcagactagagctatacaaccagctgtccttggactccggtttgcagatggcaggtcaaaagtcttctcagcctccataagtgcatgagccagttcctcacaataaatctattttatgtagataaatgatagatttattcatctagatatttatttttacatatatttctagagagtgagagagagagagagagatatcctatttgttctctttctctggagaaccctgacaaataaaacttcccaactatgaagccagttctacatttataccaaaaccagataaagaaatcacaacaggctgggcacagtggctcacgcctataatcccagcactttgggaggccaaggcaggaggatcacttgagcccaggagttcaattgagaccaacctgggcaacttaatgggacccccgtctctacaaaaaatttaaaaattagctgggtgtggtggtgcatgcctgtggtccagctacttgggaggcagtaggtggagagggtgggatgggaactgtttgagcccaggaggtcaaggctgcaacaagctgtgatcacaccactgcttccagcccaggtgacaaagtgagaccctgtctccaaaaaaaaaaaaaagaaagaaagaaagaaaagaaaaagaaaacaaaagaaagtaaaagacaactcacagaatggggaaaaaaaatttgtgaatcaaaatatttgcaaatcatatataaaggacttgtatccagaatacatttttttttttttgagacagggtttcactcccatcacccaggctgtagtgcaatgacgtgatctcagctcactgcaacctctgcctcccgggctcaagcgattctcctgcctcagtctcctaagtagttgggactacaggcgtgtgctaccgcacccagctaatttttgtattttttgtagagatggggtttcaccatgttgcccaggttggtcttgaactcctgaccttaagtgatccacccacctcagcctcccaaagtgctgggattgcagacatgagacatggcacccaggctcagaatacatttttaaaacccttagtactcacctagcaggccaggtgcagtggctcatgcctgtaatcccagtgctttgggaggccaaggcaggaggatcacttgagcccaggagttcaagaccagcctgggcaacatagcaagacccccatctctacaaaaacttttttaaaaaattaggtgggcatgttggtgtgcacctgtagttttagttacttgggaggctgaggcggggaggattgcttgagcccagcagtttgaggctgcagtgagctatgattgtaccactgcactccagcctgggtgacagagtgaaaccctacctctaaataacaagagcaaaataacccagttttaatatgggcaaaggatacacatagacattgctccaaagaagatatacaactggtcaataaatacatgaggaaatgcctgacatcattagtcattagggaaatgcaaatcccaaaccactatgaaatatcacttcactcctactaggatgacaataatcaaaaagatggataatagcaaatgttggcaacaatgcagagaaattggaaccctcatacattgctggtggaaatatcaaatggtgcagccactttggaaaacagcacggcagttccctaaaaagttaaatagagttgccaaatgacccagaaattctattcctaggtatataaccacatatcttcacacaagaatgtgtacatagattttcatagcagcactattcataacagccaaaaacttggaatcaacccaaatgtccatcaactgataaatggataaacaaaatgtgtatctatacaatggaattcagccataaaaagaacaaattactgatacgtactacaatatggatgaactttgaaaacattatgctaagtgaaagaaagacacaaaaggccacatattctattattccatttgtatgaaatgtccagaatatgaaaatccataaagacagaaagtagattactggttgccaggggataggggaacaagaagtgaatgctcagtggatatgaggtttccttcatgggtgatgaaaatgttctggaattagatagtggttgcacaactttgtaaatatgctacttgtgaatatactaaacaatgcactctaaaagggtaaattatatctcaaggaaaaaaaaggcggagggacagatttggctcatgggccatagtttgtcaactcctggtctaaagcaatgatttttggagtcacacagaccagagttagaatcctaattttcaacttatgagctctatgaccttggacaagtcacttaatagctttaagcctcacttttttatatgttggggatatgtatagtatctcccttgtattgtgtgagggtggagttaggtcaaatgtaagctccatgaaggcactcaatctccagggcctagaactggcaggctctcaatatacatgaatgaataactaaaggatttaacacagtcgctgactcatcgtaataaataatagcaaatccttatacagtatttactgtattacaggtactattctaagtgctttgcagaactttatttcatttaatacatagtattattatcatcctcattttccagatgaggaaactaaggtacaaaaaaaattatgtaacttgccccaaattatacagctagcaaatggtacaactaaaattaaaacccaggcagttgtgctcataagtctatgcaataaatattgaatgtcaattatcatcatcatcatcatagagtttaaaacatatccaaggatacagatctcctttctccttttggtatctaagcacatactaacaactctacttcctcagtgtttgatttagggtgaggatgcttcccaagtctctgatgttctgctagagaacatgttcattctttcatccatccgttcattcatgtatttatcaagcatgtacaggatccctactgtgttctaggccccgtgctatatagagataaaaaagacatactctctatcctgaaagagctcaatgtctagtcgggaagacaattataatccacagtgaaaagtgctgtagtagagattatgcaagagtgctatggaagcagagaagacccaagcagggaatagtgtggaggtaggaagaaggaaggacctgtgaacacttcctggaggaagtggtacctggagaatgttcccaaaaaggaatgtggattagttgggtgtaggaagggagaaataagtcaagattaggttaaaatatgcatatatatatagactgaaaggcccaggagcccttggtgaaacccagggaacaaacggcacagagtccaacatgaccaaaagccaggtggcagaggggacctgaaaaagctcctaagggcccaagtgccattcaagtttggtcctgagcaactaattacccagcattccccaaccccttaccctactttattttcctctgcagcacttatcaccatctgacatgtacatgcttgtttatttactatctgtcccctcccactaaaatgtgagctccctgaaggcagagactttgttttgttcactgctatatctcctttgactactgcatacacatgtttggattgcctgcattcataggcactcaataagtattcttaaataaatgaatgaatgaaataaaatcaataaactaatgtcctgagagctctagggaagacagtgatgattaagatacaggacccaacttccaggaacttataggcttagcgagagacctaatacatgaacatgagtgcctattgcactctgtctcctctcttctttcacttcctgctttctctcctagaactttcagactgttgtctgaccattcaaaattccccatccctcacaaatatttctccaccgcatccaggacttcctagttcccaaaagtggctcatgttccaacatacacctgccctccttcctggctctgcccatccaaaatctcattcctggtagctgtccgagtctactagatgttgttagcatgctcaaactaattttcactaatgtatgactcacttccagagtaatctagggtatattacttttttaacttttcattacgggaactttcaaacataaataaagcagagagaagagtataatgaacccccatgtacccatcacccagcttcaacaattgccaatattactattcctatttattctatcccccattttttttctgaagaattttaaagctgatcccaggtatcataccatttcatagctgataaatattttagtatgtatctctaacagataaggaccttttcttaacataaacacaataccattatcaaactcaacaaaattaataatcccttatcatctgtggtggttaatactgagtgtcaacctgattggattgaaacatacaaagtattgatcttgggcatgtctgtgagagtgttgccaaaggagattaacatttgagtcagcgggctgggaaaggcagacccacccttaatctgggtggacacaatctaatcagctgccagcgcagctagaatataagcaggcagaaaaatgtgaaaggagagactggcctagcgtcccagcctacatctttctctcatgctggatgcttcctgccctcgaacatcagactccaggtttttcagttttggaactccgactggctctccttgctcctcagcctattgtgggaccttgtgatcatgtgagttaatacttaataaactcccctttggccgggcacagtggctcacgcctgtaatcccagcactttgggagcccaaggcaggtggatcatgaggtcaggaattcgagaccagccaggccaacatggtgaaaccccatctcttctaaaaatacaaaaattagccaggtgtggtgccacatgcctgtagtcccagctactcaggaggctgacgcaggagaatggcttgaacctgggaggtggaggttgcagtgaaccgagatcgtgccactgcattccagcctgagcgacagaatgaaacttcgtctcaaaaaaccatgtagttctgtttctctagagaaccctaatacatcagctaataccaatctctgttaaattttacctagttgtccccaaaatatcccttacatggatttgttcaaatcaggctccaaagaaggcccatacattaggcatatacttttaggtttaagtctacttgataaaatttcaggccttatggaaaagtggggactaatcagcttgaagcccctctggacatcccagattccctaaccctaggagcttcaggatagcctctccctggctggagaaaggagctagccattcaggccccaggttcctcatcagatcctttttctgttccccaataaggggtggagggactgtcaccttgcggtggagtggggagacaaggagaaccaaagaaatgccttgcaagcaagtttttggtctgtctcctgtccaaccacccctaatccccacctccatcctagctgacctcagaaatatttggttcagctgcgtaaatgtcatcgtaattacagtcattctttggagctgcttatcattatgcctaattacagtacagcacaataatcattatgtgtatcattaaagatgtgtcagattgactttgccatgagttttattttatttcaatactaaattgctccagtaggcacagcctttagagcttgttgctcctggtccctactggggagcaggagaccagctgttggccagcctgcatctgagcatcccatcctgtcccatccagtcctgtacactgccacctgcactggctctgctgcagcccagttcggaggtgcctgcctgcctgcttgtctgcccttctgctgcatggactgcacacctgggcttaaggcagagtgatttgcacttaacaaacaacagaaacaaacaaaacaacaaaacccttcaggctctgccagcatcaaccactgcttcccctgtccaccaggatctcagtcaagcttctcattgattcaatccatgcaacatcttcattattctccctatatgatagggaatgtgaaatgagctgatatgtccaaagtcatcgggttcatcattagcagaaccggaaaaagaactagaagctatgatgctgagccagagcttctgtgggagccctggccaggtcaggctccatgcgttaggcattcgtctctggtagtggatgcattttcagttttcaaatgtactaaacgatgctatctgtgctgctgggcaacttcctgagaagcaagcacaggagagttgaggggtgtgggggcggggagcagtacttttccaactcgtgttttcgtgctgtgagaaccaaactgagagcctggacgaggtcaccctacaccttgcctcactggtacattgtcaggctgcctctgccagcagacttcttgcagcttgccagaaccaaggtcgtcacgaatcagataaaccagtgttgaagaagcatgtgtaacatatcaaatcattgcctaatgagcctttcctctgggtcctgtgcagacctaacaagtgagttcagtgcatgtttgctcaaatgctcatttattcagccagccttgagtgagggccgtctttgtgccctgcgttgtgctaagaaagcatctttgtgctaatgtagttcttgctcctaagagctgcactcacggcccaatggggaaggacagcatgtaaacaaagatgccagagtaggccagagggctgtaaaaggccttatggatggccaggcgtggtggcttatgcctgtaatcccagcactttgggaggccgaggcaggcagatcacaaggtcaggagatcgagaccatcctggccaaaatggtgaaaccccatctctactaaaaatacaaaaattagctgcatgtggtggtgcgtgcctgtaatcccagctactcgggaggctgaggcagaagaattgcttgagccagggagtcagaggttgcagtgagccgagatcgcgccactgcactccagcctggcgacagagtgagactccrtctcaaaaaaaaaaaaaaaaagccttgtggaaacacacgggagggaatgaggaactctgactttggggagttagcaaagacttcaaagaggttacatttgagctgggtcttgaaagctgagtaggaatggtctaggctgagaagggagggctgggcattctctgcaaagggaatggtgaacggaaaggcaggcaggtgtgacagagcatgaaggaacccaggatccttttgcagataaagaggaaacgagtttccattaatgtatctcatggccttaataatttaaggtcagacctggttgactggttttccatgacctttgcttccctgccccgcttttgtgccagccttttggcctttttgcagtagctctgaatttagctcaaaagcttatgctgaaatatgccatttcattttgttcattctatattttgtgccaatcacactggcccattgaatggcttagctatatgttattctaggttttgtggagcagcaaaaggaagcctttttctccctagagtcaaactcaaggaagcagagcctgctgtgagaaaggatggcacaaaatctttgaggacacctgaactccatgggctaggcatttgccgcccatgtctgttgtcagctgaatggtgtgtttgtttagctgtgactgctctcttcattagaggggcattaaaatgctgttggtttgagtgtggcaaggtgataaatcatccttgtgtggactcttaaataaactattaggggacaaacctaagtatgcctttgctaatctgttggtgagcattagccacatctagagccttggaggggcccaacagccataagttagagtttttgtaatgaaaatgaaacccccttcatttatctagcctcagaccttttcacacaatttcttcctgtgagcctcatagacaaccctttaaggttggtggggtgggaactcatgccccatttgaccaacgtggcgacagagccttgmagaattaagtgttggtggaaaccaggcccctgatcgcagtgctggggacctttcctactactccgtgctgcctgctgctgagccagcctttcccctgtgccatgtgggcctgggcagaggaggcactcacacatttacaggacagctggctgccgggaagcaccaagtctacaactgtggaacaggctccccgctatgttcacagtacccttgccttaagaaacacctctggatgcttgccatgttagcaccaaactagtgtaaggtagataaagaatgacaaaaagcaaccttggagagcaaatacccctccaagatctatgtcatttactcccttcttaccagcaggatcaggttcaacctacataaatctattttagtgtattttaattgcttgtaaactaagtgtttcctgtatatgccactgaccatgaataattagaatcatttcaatgactgggttttggraagtgaatgggagagcagacaaaaaggggctgctcagaaacgagagtcatttgttaaagcgtgagtggaagcgttgtctcagccttccccagttttggtttgtttttttcatgatgtcactagagccgcctgtttttcagctactctggctgcccttcattttgtatgcatctctcatgttaagtaatgccagctgctgacaatgaccaggcctgactggccacatgtcagagtcattcattcactcagcaaagatgtatggagcgcctactatgtgccaggcccataccaaatcttagggacaaagaaaagaataaggcccagttcccacccttgaggagaacactgcccagtggaggagacaagcacaaaaacagttacactagaatgtgtaagtgatagaatcaagaggcagtgagctgtgggaacacagaggaggaacttactccatctgggggagctgggaatggcacagtagagaggcaacatttagcaagggctcaaaggaaacagaagaattgaccagataaagaggagtggggagagacacttcaggtcaatgtggctacagtttaggggccgtagcccaggtcgtggtgtgcgataaggctggagaagtcagctgagccagactgtgaaggcctttgtatgtcctgctttcaagtttggactcagtcctgcagtcagtggggagccgaccatggtttttaagcaagggaatgacatgatcagatctgaatttctgatggaaagctcaggaagggaggggagacagggaaatcagttagaggctgactaggattttgctttgtcttccgtctggattgcaggagctccttgcctgcacctctattatggttcttcccacagtgcattataattgatcatttgcatarctgtatctccattcactccttgagggcaggggccaagtcttgtgcatctcttcatgaccagagcctggcacacaggagtgctcaagaaacattggtatcatgtgaatgagtgaataaatgaatcaataggtgctgagcaagtgcaactccagtttgccccaagtaacctctctgatgggtatatcagagataaatcctactctgatggagtagcaattccatccatggcttttcccctctctgccaagcccatcattctatcgtggtccatcacaaaagaaagatgcattattcaaagcagacaagaaagttgcttacagagctgtgttggtgctggttttgacccagtactctgttctttctctacaaattaatttttgatgacttgtttacagtatatcttcattgtccttattccacttcttgtgcatttcataccttctcttccttcttacttaaatcttgctcatccttcaaggccagttcaattgcctcccatctcctccatgaagccttattcattactcagcccccatactcagaattaagaattcccacttcagaatttcccttgagaaatgacttacctctgacattcttctcattatagttattcctgtacttgtctgcattctctactagactgtaagctcctcaagaccagagattatatctgtgtcattatcatctccccagcacctaccacactgaatcctgccccagcagataaccagtgagtgttttcaaatataggttgagcatcccaaatttgaaaatctgaactttaaaacgctccaaaatccagaactttttgagaaccaacatggtgtgcaaaggaaatgctcactggagcatttcagatttcggattttgggattaggcatgctcaactagtacatataatgcaaatagtccaaaatctgaaaaaaaattcaaaatacaaaatacttctggtcccaagtatttcggaaaagggatattcaacctgtaatacccaaagcatagtgctttctatcgggctctcccctgagagataatgccagtcttgggagtactctatgcctctttctatcttcttgcacacggttagatatagttttctttgtttaacaagtaatgaggaaaaaaaatcattgctcatcaaacaatgggaatatcacagagatagagatctcctaaaccatattatttcgggggtctttttttgtacatatttagagggtacaagtgcaggcttcttatatgcatatattgcatggtggtgaagtctgggcttttactggrcccatcacccattatttcgggtattttgatgaaatcaggaacgttcaggatggtattatttcaggtattttgaatgcacaaaattcaatgcctctaaacaaagcataaacacactaacccattcagggtcataagtacaaatctttcttgaagagcttattgtatggtgggactttttgagtaaacaaaaaaaagatgatgagcattctctttggaaggacttacaattagctctacttggaacacattatgcaaaataccaagaattcaaattttccaggtagaaatgtccagcagatgattataaatgcacgtcagaggctggtgacaaacactgacaggacccagagatgtaggatctccacataggcgtgattacaacaccaacagagggcgcgaactcctgcaaagagaaagaagagaggctgaggatataacctgagggcacctacatttcagagacagatgaaagaagaggatccagggaaggagactgagaaggaacagggagagcagtggttatgagagagaagatagtgtgatgacatgtgctggagagagatcaaataggatgagtgataactgaaaagaagaccttagttgggcaattaggaggtcactcttgatgtcctaaagcaggaatagcaaatgtagggcacatatgactacgtgccctcagaccccaccctgccggggtctatgtactcctatggatacattacaaattgatcatggcctgcttccctgttgaaccaaggcacagcttcagaatctttctcaacacagtaccccaagcagctactaccaattgatccgagttgtcaagaagctgaaatctctttgccatctctcttctaaaaaacagttcaaggctgggcacggtggctcatgcctgtaatcccagcactttgggaggccaaggcgggtggatcacctgaggtcaggagttcaagaccagcctggccaacatggtaaaaccctgtctctgctaaaaatacaaaaaatttagctgggtgtggtggtccacgcctgtaatcccagctactcgggaggctgaggcaggagaatcgcttgaacctgggaggcggaggttgtagtgagccaagattgctccattgcactccagcatgggtgacagagtaagactccatctcaaaaagaaaaaaaaaaagttcattggaggtgtgggttgcagtgagttgaagtgtctgagaaatgaggaggtcaaggtgttgaagaaaagagaaattttaagaggttcagaagtgaagggatagagagagggcagttgtttggagtagtgtaaggatcaattcttattaatcctccagtagaagcagttttcaaagtcatcttagtacttgtccagcaacaagccaggtaaagcaatatccctatacccttccttcttccatccccacccttggcttaaggaaaatttgatgtaaaaaaccttcgtgtgtaggcttgtttccaaaatattcatttgattaacagagacatatggtataaccagagttggctctgcacacagtatgaagaaggaattgtctctaatcgtggaaatttgaggatcagcagtgatggggcaaggtattagtcttggccagggctcttccctaaaactcttgaaaccataccctgaaggaaaattctggcctgcagggagacccctgccaccctgcccttgtctttcctgtctcctcctctagacctccttcttccccttcccaatctaagccccttctcatttttatctcttctactcctttctgtcacctctgtcctgtgcctctctctcctaccacttcaagtttctcattccctcctcttcttttccatctttcttaatagtcattttcacttggaatccttctcttcttgatctctctgccactctttctggcttcagggttttgggatacagggtaagctcttaagaattcaccctcattcagtctaaatggacatttgtaaagaaatccaattttactactgcccattacattcagagctctgtttctttgtacagttgataaagcacaagaaaaagaatgataatattcagcatttaatagtatttactgagcatttataataagccaagcacactgttctaagttctttacatgaattcactcatttattgtcacaacaatcctaaaaggtaggttctgttattattcccattttacaaacaagaataccaaaatacagaacagttaagtcacttgcctaaggtcacacagctagtaggtggttgtgttagtccatctgcattgctatgaaggaatacctgaggctgggtaatctataaagaaaaaagacttaattggctcacagttttgcaggctgtacaagcatgacaccaacatcttctggcgaggcctcaggaaactttcaatcatggtggaaggcaaaggggagccagcatgtcacatggccagagaggaagcaagagagagacgggggaggttcctgactcttttaacaacaaatgtgacatgaactctcagagcaagaatgcactgattaccatggggagagcaccaagccattcatgaggatccgcacccatgacccaaacacatcccaccaggccccacctccaacattggggatcacatttcaatgtgaaatttggagaggacacacatccaaactacatcagtgtagagcaaagatgtagggctcatcccatatgactccagaaatctcagtctttaactgctgtgcgtattgcttcatgacatagtggaagcctataaaatgggaagttcaaagtcattggttcaagttcatatctcttaactgtattacatagtgttaaggttatgatcttggataagtcacctaatttgtccagtgccccccacatgtgagggcattttattgtacactaaccaataccacatactttagcttggatttattcctctgcttttgctataattatatcttccctctctatttgattgtcatctccttgagagcagtcaccagaccttatttttttttttttttggtactcagcttgcccccagggcctagaatgatgcttagcacctagtacaatgcattcatgtgcacacatgcaaacatatacacgcacacacacactactgtggattgactaacataagaacctactaattagatgacatgcaaatgggctatatatatgtgttcatgaaagcctctaagtactttagctaatgaaataagatgttaatattgagcatattctttgcttaaatgtaattagtgctcaagttacagtgagctatgattgcatcactgcacaccagcctgggtgacagagtgagatcttgcctctaaataataataataattataataattagtgctccattaagataacatttcccaggtttacttgattattttgcttaataaacttttttataccaataggtaaaaccattaaaatatctgaaaaataaaaccatttccatgccctcttcattcactcaaacaattcttggcacgaccatgcactggtgtataagcctcaccaccaagcagttcttaagtgccaactctgtgttcagaggtaaaatgagtaccacaggtaggatacagatgtagtctagacaggacaccaggtttctattccagcaactaagaattcactttttttccatccccatcttcacctccacatgtagcatcttatcttcaatagcccctatctccctgaccttttggttgtgctctggacactcccaatcccccatcctcctgcctgctcacaagcgcttttgatgtgctgcttcctgccagttcaattcaacaactaatggagttattatttttgtttgtctgtgttgtaaagccatggcaataaaatctactcccaataatatcactgcaattttatgtccttaaaatgtaccataaatgccatatgtattcactgaatttcctgtaaacagaaatgtttttctgggaaaaaagagggcttttttgtttccatcatggttgagcctaagttctttgatggagtaattggtgatataggaaagattgagaagcatcattcaagaccatgttatggttcaaagtgctggtgccgtgttattctggtcatgatgagttcttttcaaacagtgattcaggacaagaaatgctcttcctgaccagaacccacattaccgtcacaggcatgacttccccaactaaaaacagtaaagcctcaggggtctgcaagagagattggcattgaccttgggcttgccctgatagaagcaagtataatttttaggaaaaagtagactgtgagttaacaataaaaaatgtgagagctgcttggatttttatagaaagggatttggacagaagctctttctttcttcttcttttttttttttgacggagtctcgctctgtcacccagattggaatgcagtggtgcaatctcggctcactgcaacctccgcctcctgggttcaagagattctcctgcctcagcctccctaggagctgggattacaggtgtgcggcaccacacctggctaatttttgtatttttagtagagacagggtttcaccactttgggcaggctggtcttgaactcctgacctcgtgacctgcccgcctcaccctcctaaagtgatgggattacaggcgtgagccaccacgcccagactttttttttttttctttttttgagacagggtcccactgtatcaccctggctagagtgcagtggtgcaatcttgactcactgcaacctctgcctcctgggttcaaggattctcatgcctcagcctcccaagtagctggaactacaggcatgcaccaccatgcccagttaatttttgtatttttagtagagatgggagttcatcatgttggccaggctggtctcgaactcctggcctcatgagatccacctgcctcagcctcccaaagtgctaggattacaggagagagccaccacgctcagccccatcacagtatctctttcccatccactccatccccacagcaatcactctggttcaagccttttttgtcccccaccttgtactattgcaggtgcctctacatcagtcacccagctttgcatttgctgctctcagttcccataaggcacagcttcagtcctgaccctgcctcattgcctgtcacatcatgtcctgtctcctcaacatgggaatcaaggcttcctgtgctctctttttccaacattagcccactaacagcacttgctcttccccaaacttgtcctgcattctcttgcctcctctaactatcccccgacacacactccatgcctgcctgtctagaatcaccccatccttcaagaacctaattcgccctactggatgtgaatctgttcagaatcccaatcattttatttcattcattcagcaaacatgaattgggtgccttttattttccaggccttatgttaggagctgtggataatatagagatttaaaaaaaaaaacagtattcttcccttgtggatctctgtctaatgggccagaaatacagacataactaactcgaaatacctattatgctgcccctgactcccatcctatagattcttttccctcagcccataaacatacttaatatcctcccatcttaaaacacccacctaccccagccctacccccgtatcaaactcctgaaaaaaaagaaaaaaaaaaaacagtatacagcaggggtccccaacccccctggggccayggggctggtggcctgttaggaaccgggacacacagcaagaggtgagcagcaggcaagtgagcattaccatctgagctccacctcctgtcagatcaggggcagcattagattctcataggagtgtgaaccctattgtgaactgcatgtgcaagggatctaggttgtgcactccttatgaaaatctaactaatgcctaatgatctgaggtgggacagtttcatcctgaaaccatccccacctccctggtccgtggaaaaattatcttccacaaaaccggttcctgatgccaaaaaggttggggactgctggtatacactagtctccttcttaaccgcccttttcttagtttcagttacctgctgtgtcaactgtggtccaaaaatattaaatggaaaattccagaaataaacaattctcaagttttaaattgcatactgttccgaatagcatgataaaayctcacactgtcctgctccctcccacccaggatgtgaatcatccctttgtccagagtatccatgccatctatgctacccgccattagtcacttagtagctgtcttgattatcagaccaactgtcacagtatcacagtgcttgtgttcaaattacccttattttgcttaataatggccccacagcacaagagtagtgatgcaggcagttcggatatgccaaagagaaaccataaagtacttcctttagtgaaaaggtgaaagttcttaacttaaggaaggaaaaaaatcatatgctgaggttactaagatctacaataagaacaaatctatccatgaaatcctgaagagccgggcatggtggctcacacctgtaatcccagcaatttgggaggctgaggcgagcggatcacttaaggtcaggagttggagaccaggcgagaccagcctggccaacatggtgaaaccctgtctctactgaaaatacaaaaaaattagccagacgtggtggtgcgcgcctataatcccagctactcgggaggctgaggcaggagaatcgcctgaacctgggtggtggaggttgcagtgatccgagatcatgccaccgcactccagcctgggcaaaagagcgagactccgtctaaaaaaaaaaagaaagaaagaaaagaaatctgtgctctgtgctaggtttgctttcgcgcctcaaactgcaaaagttaagccacagtaaaggataaatgcctagttaagaaggaaaaggcattaaatctgtgggtggaagacaagagaaacctgttctgattgacagcaatcaggctcggtactatctgcagttttaggcatccgctgggagtcttagaatctatcccacgggaataaggtggggactactgtattcccgtcatcactctcatctctgcctcctcactcccattaggcctctgcccaccctccactgactttgctgcagcaaaggtctctttccaatggacaaatcagaagacacctttcagcctccctcttttttaccctctcagcaagatttcaaattgtcgccagaactgtttccactcctgtgcccacctctgaagtattgctgttccccatgatttttccttgcctctcccctcttcttactctgtagtaagctccccccacccccagcaaccatggcaatcttgtccaattccttgattttacgttgctggtaactcctaaatctatgacatgcattgtgtcgtaggcccaacctctctcctaaactaagagaccactctgtcatcagcatcctgaccctcaacatgctcctaactgaactcccctctcacacacgtacaccctaccaccgaaccttctcctctgcttgtatccttcatcccgttcatgctcctcccacacagccagaaatccttgccattcccctcttccttattccccacatgcaatttactgtttaaccctattgatgctatctttgaagtttttctatcattctattccttccaccctctcctggttcaagccctattaccattccacagggctacagcagcagccttctaactggtgtccctacttgcattcctctcctcaaattccgataccttctccacgctgtagcctctgagccctctaaaatgcacagctgatctcttcattccctcatttaaaagcttgcagaaggctgggcatggtggctcgtgcctctaatcccagcactctgggaggccaaggcaggcagattacctgaggtcaggcattcaatcaagactatcctggccaacatggtgaaaccccgtctctactaaaaatacaaaaattagctgggcatggtggtgtgctcctgtagtcccagttactcgggtggctgaggcaggagaatcacttgaacccgggaggggaggtggaagctgcagtgagtcgagatcacgacactgaactccagcctgggcgacagagtgagactccatccccaaaaaaaaaaaagcttgcagtatctcccacaagcttctactcacttatcccacaaatatctaccacctactaggtgcacacactgttttggaaactggcaatgcagcagggaacaaaacaatgtcctgccttcacggaccttctagtcggggataaagccaaatgccttagcagggcccatcatgaaatgcatgcctgcctccctagccttgtgtccttcttctccttgtccgtgccccctagtcatatctaattcacttcaatacctgaaatgtgccccttatgtttcatactctctgcctccctcccatcctctataccccctttgcagactctactccacagtcactttttctgggtagtgtataggctaccatagctagtgctgatcttcagaatgacgtgagttcaaatctccgctccacacataccagctgcatgacttctgtcaagttatcctactgtcctgggcttcagatcctcagcttcaaatggaaacaatagtagtacctaytgcatgggttggttgtgagaattaagttagtcaatctattaaaaatgcttagacactttaggtgcctgacacataataagcttgtaatacgtgtagtattgttaatattataccactcatcacactgctctataataatccctcctatgaaacgtgtcttattgtctttgtaccccaatgactaacctagctgggcacatagtagatacttactaaatgttgaagcaaggataaaaggattggtggattcaggttcgttgcttggtttcctctaatcaaacatgattatggaggaataacagcaaccttagggcttcttctgaatatctttttgaccaactatctaattgtatgccgctttcactgtgtgagtaagacctggagagacatgaacaagaaaagagcattgaggtgggctgaactgaactcaagcttgggctgatctgaactcaagctgagctatttacatttctttcttcattgactctagggttgagaagggaccaactaccctagaatagccactacctttcacttccatccctctgccccatctcatactttccatttgcccccttttcagtaccatgttccccctcaaaagtgcataaactgaagcccagaaagcaaaagaagtgctgagggggaaaggggaaggggtggagagaggttagcacctccctctttccttcagtgagatcaaagccagcattttcccttgaaggtcagctggcctctttcatcccctgctccacctgtctgggaatgggattgctgcttgcccatttcctttcctcttcggggctggaggggcctcaagctatttctagttctagccaaatccctccactccaacatctcttttgccttacgtgatcatatttcctttccacctcgccagtaagtaacaagtggcaggaccatagggcagaaaactatgagagaagtcagtttctccacaggctagtcagtttctcctaggctaagctaatggcttaagcaagcggggagggacactgaggctgctgggcttggtctggcaggaagaacagactcatctttctacatctcggccctaagcgcttcacctgacatccttcagggtgtggatgaggcttggttaggcaagggcctcttgccccaggagaagggaattcacatttattgaagtcctagtatgtgctgggccctatgctaggcccttttatagatattatctcattggctcctaacagcccaaccaggtcagcatttgtcatcgtcaggtggaaatgatgaaacagagattaaaaagcttacctgatgacaggtacactaaaatctcagaattcaccactatataattcatccatgtaaccaaaaactacttgtacccccaaaagctattgacatttaaaaaattttttttaaatgaagcttacctgagacacacaagctaaatccaggcaccaaaatctagctcccccaactctaaagccagtgctctttccacttcatcatgctgcctcaagagtctagaaaaactgttaatgctatgaattgattctttgaattatttcacacaattagctatatggctagctaaacccttggtgagttaatttaattcaacatacatttaagggaaacccgtgatgacttgagttggacactgcagggtatgcaaacagaacatgacagaagtttctacctttgcaggccagccagctgccatgtagaactggctcacaacacaaggactttcttaaacaatctgagtcccctaacctaagaacagtgcaaataagcaggacctgggaataacatctgattggcaaaggtggggagaacttgaggaacccagactttgctattattaccagcagccagcctgcttcagcaaagaatgggttatgtatgactgtgcctaccgtgtcgctcagttagttaaarccaggtgctaatgaaaccaggacaacaggcttaatcccagtagaattgagttctgtcacatagcagccagtcctggtcccagctgaccatcttgcaaccatatgctcttggtcaaagagggagctaaagtaggagagtgagggtaagtgcataataggcacacataagtgaggacgtgttgttccaaacactcagccctaatcaagcagctcatgatgtgtcactgacagagaatcagcagtgtcatcttcgcacctggaggcagaacattccctcctcctatacctcagctaggtaccctgcacctgatctttatagcacgttgatgccagggcttcaggtctccaagaggagcttcttcattgcagctgcctttcttctgttgcgctatctaagcctgtctttccatacccatgaaatgagtgtaccacttgacacactctggggaagaggctgcctaaggagagagtgtcacacctgtttaaaaccttctcttccatagccaagcccacaaattcctcaaacttggactgaggggccctccttagctaaaaatacaagcctctcaagtttcttcaaccatgatacaggggaaagggggtaatggttctggatgtgtcccccaggtaacctctcttgtctgttccacatatgggtttggtaaagccaatctctactcaaagccttttctatctctggaactcagggcttcaggtatcagagagtaataactccagcaggaaggacctaagcccctctctctttctagatcagtccatacacacatatacacacacaaagggcattataaacattggcacagtcttggccatttttcttttaattaaatgtgtagagttttctgtcatggatatgcaaaaccatctcccaatcaagttacttccatggaatctacaaagacactgttagaatccctagagattgttccacaacatctcccacggtgccagatgtacattcagactcttaacaaggataatttggtgacaatggcaataactctggattatttttaagaagctctttgaatggcatcaaagtcatgacgtatatcaagatccttttttcatgccctctgtaccattttgttttcatggaatttgaatttccctggtttacttaccacctaacaatatcactattgaaagcacataatgttaaggaccatatgctctccctctggagagtgtgcacaaatactatttctgttaaaaactaaacagaaatagtagctttgcatatttcccattcaaagacttatcccaattgaatgattccctttgtcgtggagtggttttccccaagtcagccctaccagagaagctgaatcagatattgtgactccccagtggtcacaaggagtcatctaccaagctagaaatagaatccacaaacatttattttgattctttgaattaaaaaacaaataaactctactatagagaaagaaaaattaaagtagagaaactagacttctttgccattcctgggccagggaattcaaggcaaccaaaactaacaaagcagctgccatggtctgtggggaccaaggaaatgaataagacacaggtgctgcctgccttcggggagctgacagtccagtgtggggcgattgggtcactgttgaaaaatctctacccaatgcagaatatgcctgtgaacacctagaggaccccagaggaggtctcatccatctttatagtccctctgcaacaagcacaatgacctgcatgtgatgtgcaggcaagtactgtgtatttaagggccctgaaagaagtaccaacagaatgctcttggggttggtggagaaggagggacagctttgtgaaggaggtgacatttgagctgtgcctggaaggatggggaggtttttcacaggcagtggggactgggggagggcctttgcagtccccaggaaagagcaatggcaaagatcctaaggaaagagaaagcacggtgtgatttggaagagcaccaagcagtctagtgtggccagaggacaaggaagcagtaagagctgaagttggagagaaaagttgagacctaagcagagagaccgttggacagcaagctaaataatttcacaggggaatatcattgaaggtctgagcaaggggagtagtgataccaccaaggcagggcttcctgctgcatcatcctgttctgcccaaggaggcctcccttgccttgttggtagtatgagtttcttttgattgtttgtatgtggttggtttggaggttttatgtggcttaatttgttttttggcctttcccttttccttacagtttttcacagcatatggtcctgattatgtgctggaaatcacgccaagctgccggccagaccgcaatgagccccaccgaatccaacaaatcctcaactacatcaaaggtgagcaccgcccctcgaggcctgccctccttgttccacccagtttgtggtggcccatcagtgggggcttccttaaataccatttgccttttggtaagctaatcatttcactgacttggaaaggaaacctcttcttggcctgacagcttgtagctggaattctacactggccactctggttgggattgtcatttggctggctaatgtcacctcagaaggacaaagggttcagcttttggcactgccaggggaaaatcagctctaaagtgttccctgagaccctttttctttcaaaaggccaatagtaaagcactctttaagatgagaaaagttggccgggcaccgtggcttacgcctgtcatcccagcactttgggtggctgaggcgggaggattgcttgagcccaggagttcaaaaccaacctgagcaacacagcgagattccatctctacagaaaatttaaaaattagccaggcatagtggcatatgcctgtggtcccaaatacttgagaggctgaggcaggaggatcccttgagcccaagaggttgaggctgcagtgagccatgcccacaccactgcattccagcctgggcgagaccctgtcccaaaaaaaaaaaagaggaaaattcaagtcaattcagacttagcaggggtggggagggggctcacaggcattctcttccagtatgtatgagtccttgatccagtagagccttgaaagaatgtggaactacaatgagtagtcagggattctgatgccctgggagtgggttacctggactcagccagagtgctgcagatgggctgctggcctagcctccttgctggcctagcctccttcccggcctagcctccttcccttccccaaggctggcctggaatcattctggcctcggggtagaggggaagtggcagccatcagggcatttccctcctgatcccactgtccactggctgtttggggtcactgtcctcagcattctagtagcgccccctctgaactccagctgcttcttcacaactcactttatccaccattcgcattacgtatttttggcacccattttcctgtttaattaaatgtacatatacatatgtgtattttttagatcctaattatttgccagagttaagaggccaagggtatctttttgcctaacctggacagggaaattctcatgtttattcataaaatgaccaagatagcaccagttctcctacctttgagtccctcgctggaatataatccaacacaaaaaggaggcctgttctatgctggagttagtctgaggaaacactacactcggagagtctttgctgtgagttacattaatgcccctatccactagcagagcccagtaaatgacagcagcaaagtcttcatgtcctgagctcatttagccagagaaaagtttttaagctaagaagtcatagactctcaaggttattctcacagcattgctgattgtcccctctgaggcgtcccttagccctcagccttctcgcgaccctatagtttcaagctaactccctctcacctctcagtggctactgaccccacaagtccttgcttcctaacaaaatcctcctcccttatccaacttttraggccttcaaaatccttccactcctggcccttctccagttcttctcatggtgttgcagccttgatgaacactagccatccagcccgttttccctgctcccctcaaacctggtacgcatgtcctgtgttcctcagaactgatcctggaccggcttctcttacccttcttccttcaactctgccattttcccccatccaggctctaaatcctggtagagcacagacaaagcaatagaaacagggaaaccaagcaagccttgcagctactcgctcacacctccatatgtgcagatatgtgtatgcccttgcttccctgcacacatacccagggacatagctccagagagtggtggcatcttgctattgaggaaatggaaatgacaagtgagagaagacataaggaaggtaatgcaaagggaagagaacgaggaaaggtaagaaccctaaaagagcagaaaatcaaaaagagatttgagataaaaggctaggacgagggttggtgaaaaaaataacagatctcaaaggacatgaaaattacatggaagtcaagctttttaaagatcctaacaggttaaagcaatattctgattgtaacccaatgaaatcaaactggaggaaaacatatggaccagaaattgggtcctacaaaagcaactacatgcatgcaaactggggcaacatggcttagcagcattttgctaaaagagaattagggatttgagtcaactcggagctcagtatgagtcaccagggcaaggtggcctccagagatgctaatgcagtatcgacctcattttaaagggctctagacaaataggagcatgttcctggaggtcagtcaggctggggagaggactggagcccaggctccaaaaggtctggttggaggtgctggaaccttttggagaagacctcggggatgtggtctctacttcatatatctgtcacagtgcaaagggcatagacagggtctatgtggccacaaggcatagagctggacccatggatggatattttaaaaaggcagattttcattcaatagaaggaagacattttctaacaattagaactatccaaagtggaacagactgcctagaaaggcatgaggtctctgtcactggagatatacaaatagaagctagacaatccctaggctgtcatattgtagaagggccccttccttgggggagggtgattggactaaattgctgttaaggctccttccaaccctaagattctaggatgctgtatattacaatgagaaaatagaaaaagaaagaatatggtgagagtgcaggggttggcagatgagtcacagttgttgggtgtggggaggtgatgccgtgtataggaaagaattgaggcagagaagaagagaaactacatggctaagagtgggtgaggaggagccagagagggtagacagcaagtggagtggctacagaatactaggaatgttcagactttccatttagccatccctttcatattgacaaagtcttgttttctagccatgcaaatttagcggaacacacaagctcagaaccaaagagaaattcagctaaacctttaagaaacaaggctagaaagaagtccaaatgttgctaaaaatggccaggctaacctgctatactgatactgtgccccttcagcatggtgacgcatgctgccatcagatagtgcgttgccatgacaatggtcagcgtggaaaggctgctgaattttctgaattctgaaaaattttcctgaacctgtctacaagactgttatttgttcttgcttataaaaacctcagtgaagctggtcatttctctctgtacctcccctccacctcccctcaccccatgaaaaacaaagagtaggatgtgacacagattgctttggagaggtaagatggcaatgagggaatgaatggattcagctccactctatgtgtgggagttcagccagcatatctggttgaatttgttcagcctttaagcttgggctttttctctttcttgccacatcccttagaggcacaaaagatgagactgtagcctattggaaaccaaacctgagaagattcatcttacagagatgtgttccgcatgctacaggatgactgaagggacaggcaaatttagacctcaacttatcccatctttactgcccattagtctttctgagaggaaaaagacccacaaaaccatggagagtccattcaagctcttagcttcacacagagaaaagctcctctcgtgccaatgagctgtcttgaaggcatgtgtcgttgttcataagaaagtacaggttagagagcagatggcttagtccagctcatgactactattgtaaaatcatccttgcaccatsttcatttgcttaaagctggttgcctttcctctggtgaatgtactccagaggaactggctcacggtgaaccttccagagttggaataatgctgatatgattaatccccagggagggctagctcctcaagcctggctagctctgcatggggaaatgcagatagaggtaggaggctttctggtctctggtactgatgacattcgaatcaagtggaggtccctaggagactcagagctccacattgcagcccaggcccaatcctcttggggagcaggagtgggggagttgtgcatttgtgagaatgtgttacagttgtaactggaggtttcaacacttgctctgtgttcccagaactattccccaggtttgactgggagagaaaaagaaacaaacaaggtcaggaagtaaggaggaggaggagggaagggggaggcagaagacacaagggaagaaaaaggccttgcatgcatctgccctttcttccccttactgaaggagccttaggatggcaacctaacaaactgatacgggtgtggacagaaacaacacagatgaaataataagaagaatagctactatttatcttacagataaggaaactgaggctcagggaggataggtgacttggccaagatcgcctttattcattcagcaggtggtaattactgaggacctactgtgtgccacacactgtgctaataagcagtggagtggacattggaacacaggcctggagtggagcttcagagtcaggctgtttgacctttatttccctcctctccttggcagcattgctctgtcaaatctgctcatcatcccgtctgctctttccgatcgcccctagtaaaccctcctacctcacactacatgcccagctycttccatgtggctaatcctaaacactaaactccctggaaatgggaagaagacagccttgggcaacctttgaaattctggccccygacataggctttgtagccctccctaggccccgccccctcccccaccatagtgtaatctgaagcttctagctccctttccctagtagagaaggaaaagaaatggacagaaggtaggagaagccagctcacccagctcctgctgcctgaaatgtgctgtagccaccagacccagtctgccatttgcagttccacagccccaatctgagaccctttgcacatctactggtaatattcttaggagaaccattgtgctgcgtataagcagcacttcctctggcagcctgacatccgggattggcatccttctaggggctagcaattggagctcaggtttgcgcatattcaaggcctgctggagccccaggcttgaagcagtgctcctgcatggtgggactctataccatggaaacttggcttccttccacactgtctctttcttcttgagaagccatgaggataagttgaaaggtagggttggtcccaaggataaactgaccatttgctttagggcttcttggaaggacttcagagtagggttttggaggatacctgagccaatttgcatgacttcaggtgaaaatctctgtgatgtccatcctttatctctctttcctgtcccctgctggctctttattcctcttcatctccctgtggtcctttccaggagcctactgccagcttgggcttcttcatcaagcaagttcctctctttcttgtttcactaaagagtataagagatggaaaggcttcttgtcatcrttgttattgctgttgttaaacagaaaaataagttacaaaaatgtcatgctgaaaattttaaaaattctgggccgggcgccatggctcgagcttgtaatccagcactttgggagactgaggcaggtggattgcttgagccgaggagttcaagaccagcctggacaacatggtgaaaccccatctctacaaaaaaaatacaaaaattagccggatgtggttgtatatacctgtagtaccagctacattggaagctgaggtgggaggattgcttaaccccagggaggttgaggctgcagtgagctgtgactgtgccactgcactccagcctaggtgacagagccagaccctatctacaaaaaaaaattttttttaatcctaaaataaaaatggagactgctccccaaagttacagtaacttagacagcaacttttaagaaaccatgaaaacccttggcatattactcatgaagacttggaayttctacctaaatctgtgaagtgggaactactgatattgacagggtacagcacaacaccctgtgctgggtacttcacatacatgatctcttttaacctcacaatttccttatgaggtaggagactggcacccgaagacattgtgtaacatgccctaatcacgcaagaagtaagtggtaaactcaagatttgaacccagacctggtggccctcttctccgtggcagcattgccctgtgacacctactcarcatccatctcctctgcttttttctagtcgctagtaaacctttcccctagtaaaccctctccccctgctcaggttcccaaagtgagcttcagaagcagtttaattttaagagatatgattgtgtctccactttaaagcccagctcaagcaatcaacacatatatttttgaaccccacccccctcatgttggtgccattgggagatatacgaggtgtttaagacatgatccctcctcctgataaatagttgagaaatctaggttagggaggatttgaatagatcagagtagggatgcacttgtaagtgagggaaattcagaagggtggggatggggggccgattgcaggctcccttgaatttcaggctgactagttcatatccacagtaaagtggaagtcattctaggttctgaaattagagcaccacatgatacagtgatatttgggatggatggtgatggtagtgcaagactgagactgcaaggtcctggactagaatagtggtggtaaaatagaagaaatgactgagagctgttatgaagagagtatcatcaccagcactgggaggtaggccatttatagaggatcagrgagaaaggaagaagtaaaggtgactctgagatttccagcctggataccgactgaaatgggaagctcttgggggagggaacatagctttactgaaacatatacttgatgtgttctcttttgatgtactgaatttgaagtgtcttatgaattccatacagtgtatctacatgaaaaaatttgttgcagccagttaaaaagcaaattttaaaagataatttgatgacatgagaatatgctcatgattacaatgttaagtgaatatgaacaggatacaaagtggcttactaccatatagtctcaattttgtaactatatttagtgtgtgttttgggagaggggatatgcacagaaaaacacaagaattaagtgctaacagtagtcatctttgatgatactttaccaaagtaatataccttaacagtagttatctagaattagaattatagatgatttttatttttttatgctgtttctgtatttttcaaaatttctaccatgaacgtgtagtcaggaaaaaaaaaagtaatacatgctggcaggggcagagggcactaccctattacctccaggtggggagtaaaagtctaggttccctactcagccaccattgacaccctggggagaagaagggcacctcagtattgctgggtggagtagaattcaggctctccaatagacctccactgataccactctggccaaaaatgggagcggcacctttttattgctccgcatttggcctctactgacatagcagtgggtgggcctccttgccattaagcaaagatggaaagtcctgactttctactctgccttctttgacaccaccctggtggaatggaagggaagcctaacagtaaccatttagtgttaatatgtgccaggcactattctgggcactggcaatacataattaaatagaatagataagccaggcacagtgatgtgggctgatagttccaaatacttaggaagctgaggaaggaggatcgcttgagcccaggagtttgagaccagcctggacaacatagtgagaccctgtctcttaaaataataaaggaaataggtcaaataaagtccttgcccatcatggagattacattctagtgtggaagatagacaataaacaactaaataaaaatttaatgttgtttactgataaattctgagggatgctaytcagtaaagacctctcggaggaggtgacatttgggaacagagattaatgaaatgagggaaggagatttacaaaatttgagttcggccgggcatggtagctcacgcctgtaatcccagcattttgagaggccgagacaggcagatcacttgagcccaggagttggagaccagcctgggcaacatggcaaaaccctgtctctaccaaaaaaaatgtaaaactgagctgggtgtgatgacatatacctgtagtcccaactacttgggaggctgagatgtgaggatcaattgagcccaggaggtcaaggctgcmgtgagccatgattgcaccactgcactccagcttgggcaatagagtgagaccctgtcttaaaaaaaaaaaatggtagtgaagtacattctagatgaagagacaagcaatatcaaagaccccaagagaaatggatttagtatgttcaatatagatatatgtttcaatgtgtattaaaaagaaatataattatcagatcaaactctttggtttcaaagatattacttaggatgaggctggggtttttttatgtctatataagaaaagtccacataggcggtatgtgaatatggccaaactcttgacagtatagaactttaggaagcagatcagtctctaatgtatataatattattagscccatttaatagatgtaggaactgaggcctaggggagttaattagcctgtacaaagtcacacagcaggtaagtgcggaagataggattccaactgagacgctgaggatcatactcaaagcttagaagaggaaataaggaattttccttctgcctggcagagctgctgattgttgcataaacaaaccaataatattcaaagagtagttggaggcctctaataygtttaattaagcatttttttcttgtgtgcccgaagtacatgcccaaagcgattgtattgctcatttccctccagcttctagttctaaaatgatcaaggggtagaaggaaggttggaaattattaggaaaaataaggtaaaccactcagggttttggaatgcctaactgttgacaactttgtcagtctacctggaggctctttagacaactgagattcaggtgctgtcttgagcacagccaccaaatccagcagtgctaagggtcattttctgccagggtaagtgggcctagcctccttggccttgccactgaggggcagctgctgcaggattctcaccacagagttccagaggagggtctgcagacctcccatcccatggttttctgctgtacctggacagggacttccccaagccatggtcgggtcatgaaggagctcacagtcttttgagaaaggaaagtatctttacaggctcctggtttgccaacattcttctgcctctttgcagctccaagcacattttggagggagatttcacaaagatttctaaattgagttagaatttcaagtctattgtgacatgcaaattagtcctgcttgcccattggcagcaatgcagctgaagtgcmtagagacgggccataaaatggaaacatcaaagtgattaaatgtgcccgaagagcataattgagtgcatgaataagagaaaataaaacaaattgattttctccagtgccagaaaaacagaataattgaaaacaaaataatagactttgaagtaatcaaagtgaggaatgcaccatagtgacatagaaacagccagttgtgggagagatttattgtgtttctgttatcatttttacaactttaatttcattagctaataaatacaaatcaattgaaaaatcagtcaaccagagagacggcagtcccaagccaagatttttattcacatctctaaaacaggctgaggtggtgattcttaatctactttcataggtgcacatttctgccatgagctggaaaacaagttctgggaggtctgtctgctttggaggtggtgatgttctgttctgacagtcactttccacatatagacttacagattcaactttcaaaagggtcacttttataccccgccaaratttctgacagagaactacccaagtacaagcatcttggtttacatagatgacattttcatggcactgaccagcaactgtggtcttacacaaggtcatcctggattcatttggtgatagtggtggtggtggcagctatggcagcaacaatagcaggagcacctgctgctctcacaatactgctgagcatctatggctcactgcttccaacccccaccctcatcccctgacacatacgtgcacactagtgacactgaaatctaatctaaaaccaggaaggccagtcaagagtataccactcttttggcttccagcctggtgaccatgatcctggggaagatcacaggaggggagctgggccagaggagacttctcatgttcactatggcaataaggaactggggacaccaagccatgctgggctcacatgctgaatgatcacagagcaatcatgagaccaccacagaaccatttttatggctcctccaagaaaagaatccctctaccccactcttcagctgttcacggctgggctcagtgacccttcacttcaggatccacagtgatagctaatgtgacttgaattgtgggttttcctttcacaggcccttgagctctctggcagctgttggcacttctagatgtttgtgacacaccctaccttcagggctccacagttagcgactgtttctttggctccagtaaaggtctttgggaccattgggactgtaaaccagggtgtgcagaaggagttggcagtgctgagactggcattacttgttggctcagtcaggatggcatagttaatagattgtgcctgccaggcaatttgtcctggagaatttatcttccaggaagcacctagaagctgaagggagcctctctgaccttctggtggcgtccaaggcctaatcatgatatgccttgaggtgaataggggatattagcatttaggttttttgtgcaagagagcgagagttggtctccagttcaagtcaaaaatcccagcttccatttcccactggtgtttgggtggggcaaaatagagcaaatagctttcaaactctaaagcattatacagatgtaaggctgtattattcctcctaccactgctattcccattatcctggatttcccagcccagaatttttstctgagaaaaagaaatgtggagaaggcacatcgaccaaagaacctcggagctctgtctccaaaacggctgggaggcattgcccagcccagcagatagacaactgccggggcccagctccacaagctggctggcaggcaagcagcccactcctgtgatgtcacctctacagttacttgcgcccatccttccacatgaagccagcagatttaggcacaggaggggagaaaaaatgaatcataggctattttagaaattgcttcggttctgtttgagactgcagtagtgccttgagaactaagacgagagcaccctaaccatcagggtaatatcctctaagtgctggtgtcctgtaaatgtcagaagcctggtgggattaatccacaacctcaggttctaattcaggtcagaggcagacaagtggtgattggcagttttacttaattgtcaattaaaggctctctgatgacaggagggatcgacattccaaggcaagcaatgcagttgacaattaagagctaaaaattaaaccagccatccatatcatcacatgcccaaggcttcataggaacccttggtactgcaattgttcccaggtagaaaatgaggtccttgaacctggccatgatggggcagcagctggaaatcttgctctagccctggatcccacaagatcccctgctccctgacaatctctcagaggctccccatggcctctcagataaggccctggccttgatatggcctctggccacctctccagctgcattgctcccctccctgaacttcatcctgtatcctgacctcaaaaactttgcagttggctttatayatcctgctctgttcctgctgcctggaacattcttccctcctttgcccttcaataaaccacctactctgtgaagcctcttatgccctctttttctgcccacagcactctgtacatactagaattgtatcaccttgctgctgtggactataatgtgtttgcctccatatatgtcttcctcacgaggccaagaactccttcacggcaagaactgtcttgatcccctctgtgaccccagcacccagcacagggcctaggccattgtagacatcagcaaaggcttaggcaataaatggacagaaaaatggaccagattgggctgagggagctggatagctggatgagagcgggggtgcataccatctaagattctcagataccagagcctgccagcagcaggacagcctggacaccggctggccaagggtaatccctacaatgatttttctcaagatgtgcctcatgttcctctatatgagagacaatctgaggtgacacaaagacatttttaattttaatagtcatatttattttaacgtatgctttaaaatgtaataagcaagttgtctattattattattattgctgcttatgatagatgaggccaaaataggtattaaagtttttttcttattttttaaaatttctttttaaaaattaatagagacagggactccctattttccccaggctggtctcgaactcctgggctcaagggatcctcatgcctcagactcccaargtgctgggattacaggcgtgagccactgggcttggcctgaaggtttaaaagtgagttaataacccaaaaaataaaaaaataaaaaaattatatatatataaatatatrtatatatatatttgtatatatatatttatatatatttataaatatatatatatatatatcaaggtgactattaatacagctgttaagtagatataaaaacattcctaaaagaggtactcatatgacagaagttttggaaacatttttcaacagtcctaaattcacttctctgttcctttgtggtgccacccaacctccaagggttcctgagatcacaccagcatccctccaaactgctgtgatgctgattgcgttcagaacttatgtatcctagcctggttctccttttgttagcatgtgtttgctcaccttacccacacttataaggtccttaagagcaatgaccaagctttaagcctctgggaatttaatgggaaagtgcttgatcaactgccctgtagtctacagatgtcttttccttcagtgaataggtactgagcacctactaggtgtcaggcactactgagggtgctaacagtagagtaatgaccaagacagcagacaaggtccctgccctcatagagstggtgagaggaagccaacagcgagcaaataaagaaacaaacacacaagatgttttctgtgcgctaagtggattgaagaaaataaaacagaatcatgtgacagaaaaggagtgactgagggggtggcttcttagcttgggtggtcctaaggtctctcagaagtgactttggggttgagactcgtcgactcaaggtgacaaaggttatgagaagagttggaaatggggatagccaggacagagcattccaggaagaaggaagagcaagttcaaagacaggagaagccctaagagggaaaaatgatttctgtgctcaagccacacaaagaagactcaagtgagcaaggagggtggtggtaggagacaggaggcaagggaccggcccctgcaggtgagtaacttagattttattgtgattggaggctgttagagggatttgagcataggagtgatgtggtctgtcctaagtattaacaaaatactctggctgctatatagagaacagggttgtaggagacaaggaaggaagcaaggagaccagtcttgaggctattagaatcatccacataaagggtaagaatagtttggggtacagttacagcagtgaaggagggaaaaaaagaggtagatttggaatctattttggaggtagaatccacaggacttgctaatagattgaaaaggaaggttgtaaacaaaggaggagtaaggatgacccctagtcaacgtcatgaaggaaaaaaaaagcacaagaggactgttctatgtctgctctgtccactatagtctcaccactagccacatgtggctaagttcattaaaattaaacaaaatataaaattctgttcctcacttgcactagacatatttcaagtgctcaatagccacatgtgactagtggctaccatattgagcagcatagctgtaggatggtcacatcatccaagaaagttctattggaccgcactgctccacattaaaaagattaagagaataaaaagacaaaccacagactgggagaaatatttgcaaaattcatatccagtaaaggagttcaatccaaaatatacaaagaactcttaaaactcaacaataagaaaacactcaatttttaagtgggcaaaagaggctgagtgcagtagctcactcctgtaatctcagcactttgggaggccaaggtgggcagatcgattgagtccaggagtttgagaacagcctgggcaacatggtgaaaccctgtctccacaaaaaatttaaaaattagccagacatggtagcatgtgcctgtagtcccagctgctcaggaggctgaggtgggaggatcacttgagcccaagaagtcaagactgaagtgagctgtgatcacactactacattccagcctgggcaacagagcgagaccctgtctcaaaaaaaaaaattaaataaaaaaattaaaatgggcaaaagcgagcccattttgggggtgtggtggctcctgcctgtaatcccagaactttgagaggcttaggagggaggattgcttgaggccaggagttcaaaaccagcttgggcagcatagcaagaccccatctctacaaaaaatttaaaaatatttwaaaaaaataaaaatggacaaaagatattaataggcacctcaccaaagaagatatacagacagcaagtaagtgcagatgctcctctgcctattgcagtggggttatgtcccaataaatccattgtaagttgaaaatataagtggaaagtatgttttcaacttacagtatcttcaacttatgatgggattatctagatgtcaccccatctcaagttgaggagtgtactgaatgcattattacttttgtaccatcataaagttgaaacatcttaagtcagagactatatgtgaaaagatgcccaatatcatggtcactaaggaattgcaaattaaaatgagataccattacatatctattagaatggctaaaatccaaggcagtgacaacaccaaatgctgttaaggatgtagaactacaggaactctcattcattgctggtaggaatgcaatatggtacagtcacttgggaagacattttggtattttcttacaaaaataaacatattcttaccacatgatctagcaatcacactccttagtaattacccaaatgaattaaaaactcatgtccacacgaaaacctgcacatgaatgtttgggggtcttttttgttgtttgtttgggttgttgttgttgttgttgttgttgttaatttttttttttttttttagagacagtgtttcactctgtcacccaggccagagtgcagtggcacaatcatagctcactgcagccttgacctcctgggttcaagcaatcctcttgctccagcctcttgagtagcttggactacaggggtgtgccatcacactcagctaatttttttattttgtagagacagtttctcactattttgcccaggctagtcttgaactcctggcctcaagtgatcctcccgcctcagcctcccaaaacactgggattacaggcatgagccactgtgcccagccctgcacaaaaatgtttatagcagctttattcagaattgccaaaacttggaagcaaccaagatgtcttgcaataggtgaatggataaacccgttgtacatccagacaatggactattattcagcactaagaaaaaatgagctatcaaaccacraaaagacatggaggaaacttaaatgcatcttgaaagaagccagtccaaaaaggttacatactgtttgattctaaccatatgactgtaaaaagatgatggttgccgggcttcagtgaaaggaagggagggatgagtccatggaacacaggtgattttgagggcagtgaaactattcctgcatgatactctaatggtggatacataacattatatacttttcaaaactcatagaactgtgcaagaccaaaagcgaatcttaacgtaaacagtggacttaagttaatgataatgtatcagtatccattcactaactataataaatgtatcacactaatgcaagatgttaataataggggaaactgcctgtaggggaaggggaaggaaatatatgagagctctctgtactttctcttcagtttttctataaacttaaaactgttctaaaagtaaaatatattaatttaaaaaagaaagactaaagagattgttcatcaacacctaacaaaatacctggcacagagtagacacgccataaatgtttattgaataaattgataaacaaatgagtcaaccagtggttcagtagaacccaggccccctgagtcccagttcagtactccttcttgtacatcagagctagagtaacagtatagtttattgtccaaaccaggatatttgagagtgaaatggggtgccttaggtataaatcaagactgtttcagagataaccagaaatcacaaactggcagtccataagctacatctcgcctccaaaattgttctgtttggccactcatcttaatgcctcatatgatattcttttaaaatgtcagtcatttgcccaaatttaacacagtggaaactgcataaaaatgtgaaatttggacttctcttggaaaatggaaggactcggtcccatggggccgacaggactgcacagtggtgagtggctggagctgagcagcagctgcccacttttgccagcaggtaccttcctctttgccacaagccccaccagtcccttttgtatctcttactctaggccaagtgtgagtttccatttacactgtcttggttttgttttcttctgtggcagagttaagaaaaaagggaaatatttcttacacttatgtcatgattcaaagtaagaaaatgaaaaaaggatcaagagggccccttgtgtcttgcccccagcctgctttacaaacagtatattcttggcctctctaggcagttgagtctgcccgctgtggtctgaacttcttgtctccctaggccccagcctgtgctagcctttagaattttctcaggctgcyacccactgctggaaaagctagatgtgaggggaaaacaatgggcattatttaagcttgcatttttattgttaccccaattcaacattgctcatcatcaacttcttggtgaaaattatttctgttgtttttcttaattgcctccaaatttaactggagagtgaggcagagcagcagaggagtacagcacccacctttcctccctgcgaacatgtcttgttggaatgctttgacatggaattttgttcatccttgcattcagtcattcccctagctctggctatacttacagatggaaggactctcacttcacaccagtgtcccctgtaggttgtcctcagctgaggcaacaacacaagcgaaggtgtggaaacaggaaagcatggatggggcccatttacgctaaggagttggacttcattcataggtggtaggtcgggaactgctaaagtcttttttttttttttttttgaaatggtgtctcgctctgtcacccaggctggagtgcaatggcaccatctcggctcactacaacctccacctcccaggttcaagcgattctcctgcctcagcctccccagtagctggggttacaggcgcccaccaccacacctggctaatttttttgtatttttagtagagacgaggtttcaccatgttggtcaggctggtctcaaactcctgacctcaggtgatgcatccacctcagcctcccagagcgctgggattacaggcatgagccaccacgcccagcctgctgaagtctttttgagcagagaaggaatgtgatcacagctagcaattgtgcagggaatagctctagaagcaggaggaccagataagaggttgtcgcagtgacctgagtaacaagagatgtgactaaagcagagacagtggaacagaaagaaggggatagattggagagacatcttgaggttaggcttcacaactcataagatgtggagaaggcgtgaactaagaaattaaggatcaaagattatccagagatttttttgagttagggggttgaaataccaaaagcatgatccaaaaaaagaaaaaaaattgataaggaattggagctcatcaaaatcaacttttgctttacaaaagaccctgttaagggaatgaaaagataagttacatactgagataagatatttgcaaatcatatatcccacaacagatttgtatctaaaatatataaagggctgggtgcagtggctcacacctgtaatcccagcactttgggaggctgaggcgggtggattatttgaggtcaggagtttgagaccagcttggccaacatggtgagatcccctctctactaaaaatacaaaaattagtcgagcatggtggcacatgcctgtaatcccagctactagggaggctgaggtaggagaatcgcttgaacccaggaggcggagtttgcagtgagccgagatcgcaccactgcactccagcctgggtgacagagtgagactgtgtctcaaaaaataaaaataaaaaatatatataaagaactttccaaactcaacagaaaaaaaaaaaaacaattaggaagtaggcaaaagacaagacatgaaaaggatatacagtcagcaaatgagcacatgaaaagatgttcaacatcattagccattgggaaaatgcaaattgagatcacaatgtgatatcactatacatctatcagaatggccaaaataaaaaccaacaccagatgccagcaagaatgctgagaaaccagatgactcaaacattgctggagggaaagtaaaatggtaccaccagtctggaaaacagtttggcaatttcttataaagctaaacatgctactaccatacctcccagcaattattctgttgagcatttgtcccagaaaaatgaaaactatgttcacacaaaaacctgtatgtgaatgttcatagtggcttgattctatagccaaaaactggaaatgactcaggtgtccttcagcagataagtagttaaacagattgtgctacatccatactgtggagtactactcagcaaaaagaagcaacaaacttgatacacaccacaacttggatggatcttaagagcagtatgctgagtgaaaaaagcctatctatctcaaaagtttatatactgtatggttccatttctataacattctcaaaatgaccaaattttagagaaggataacagatgaatggttgttgggacttagggatggtgaaggaggagggatgggaatgactgtaaaggaggtagaggagggaaatctttgtggtgataaaatagtttcgcatcttgattgtggttgaggttacatgaatctacacttgcgattaaatggcctagaattatacacttatacacacacaaatgagtgcttgtaaaactagtgacatattaataagatctgtgaattgtaccaatgtcaatttcctgacttggatattgaacagtaattatgtaagatgttaacatgtggggaaacctggggaagggtgtgtagaacctctctgcactattttttttttgcagcttcctgttattctataattattttaaaagtaagagctcagtacaaaaaaggaatgaacttctattgatacatgcacaaatctgcatgaacctcaaaggcattatgctgagtaaaaaaataaaatagcctatcttaaaaggttacagactgtttgawtgcatttatatggcattctcaaaaagacaacactacagtgatggagaacagatcagtgcttgctaggtgtgggggagaaaggaagatgtgattgcaaaaggatagcacaaggagatttgaggggttatggaactcctctctgtcatgaatctatacatatgtttaaaatcagatctgcacatgcacaaatgtcaattttactgcagaataaaatttaaaataaaagtagataggcaaggccgggcatacctgtaatcccagcactttgggaggccgagtcgggtggatcacgagatcaagagatcgagaccatcctggccagcatggtgaaaccccatctctactaaaaatacaaaaattagctgggcatggtggcacacacctgtagtcatagttactcgggaggctgaggcaggagaattgcttgaacccgggagattgcagtgagccgagaccgcgccattgtacgacagcctgggcaacaagagcaaaactccatctcaaaaaaaaaaaaaaaaaaaaaaagataggcaagtagtttgtttctgacttgtttcttctttccttccttcctttcattcgtccattcattcagccatttactgagcacctactatgagtgaggcactgtgcaagactttggaaatcaaccaaaagtaaracagccaggccctgccctcagggagcattgtttctgtttcagagaagtggccagtagggtttggagcccagtgtttctacttggggaagtgtggcaaggcaaagactacggagggacaaagtgagcaacttttcattcctagagcccagtccggtaggatttcaaatgatcacttttccctcaaagactcttaggcctgagatcagaggaaagcccccaatccgtgtttcacaggtactcacaagagaaaatgctaggagggttgtgccttgctaagggaaggaagaaaagttgggggtggggagcatgagatttgatgcagttagtaaagaatgaactctgaaaagtgttacgagagagagagagagacttaaaacaaccatttgtttagctcatgactctatagattggcaattgagctgagttcagctgggtggctcttctggttctggctggatacacccagcatctgcagtcagctggctgtcaaaggcctcgatcacatgtccagtaattggctggtggttgcctgggtgacagggatctctgggccatttgtttctcatcatccagcaagctattctggtcttgttccttatggcgaggtcacagagttcccaagagcagcagagaataagccccaaaatataagtgctttttaaaaaatagctctattggggtataattcacatrcattacctgactttgaattttgttttctcccctgtttgcagggaatctgaagcatgtggtctagttgacagaaagagatcaggtttccagagctgaggagtggtgcctataatgaagacagcgtgtttatgcaagcagtttgtggaatttgtgactgcagggaaaatttgaaagaaattacttcctgaaaatttccaaggggcatcaagtggcagctggcttcctggggtgaagaggcaggcaccccagagtcctcaactggacctaggggaagaaggagatatcccacatttaaagttcttatttaaaaaaacacacacacacaaatgaaatttttaatctttgaaaattatttttaagcgaattggggaggggagtattttaatcatcttaaatgaaacagatcagaagctggatgagagcagtcaccagtttgtagggcaggaggcagctgasaggcagggtttgggcctcaggaccatccaggtggagccctgggagagagggtactgatcagcagactgggaggtggggagaagtccgctggtgttgttttagtgttatatatctttggtttttttaataaaatctttgaaaacctacctctttgtcccgttgtcttcattgtaaagcgccactgacagcacacacagttctgaacttttcttctcgctgaagtgtcaagaataaccctgttccttccaatctctactctggcccggcttgagagtctgacctcactggggaactagtgtgtccctagcccaagttcttgggacagaaggccaagctctgtgttgcactggggctgtccatggtggggtaggaatactggcactgcagtcatggagaggggcttattggcaccctggggaggagctgtccctgtccagggagtgatttagggatggaaaaggtgtgttggcatgtcagatccaagaggagcacttccatggatagaaaggatgcttcccagtagacaattggcacataatgaaaaggggaggaagttgtaatgtgtggtgttactgcaacctctggggagttggcaacatggaaaaatggggatgggagataatgggagagatgaggaagagacaactaaatgtcatgatattgtaattttatttaccaaatatttacaaagctccttcaactaactactgggaccgggacggcagacaagcacacagccccatccatcctggctgtctaggaattcccagacaaggcaagggaggagaaaaagaagcagatcccaacatgtttccagctctgttatcaacatgagctcagagctgtgggagcacatttctacttttcagtattttccaaattttctgtagtgggcacattttactttaataatagaaaaaaataaatacataaaccccaaaaaaaaaaaagaaacaattgatccgcggggagttagggggtagttacagatcaaagtcagttcaagacacccactgaggaagactttgtgctcaggccctggggctgttctaattgcctggaagaccgatcagtgggggcgatggcggggagggggatgcgggggagggggatgctttttagatcagttggcttgagggtggggcaaatttgtccccaccataagcctgcctgtcttacctttaggaaattgctgccgaccccgccaccacccaccccttgtgtctgcaagggaccagccacaataactataacaacaatggtaaagcaagcattggcatatgccccattttacagatcattttcacttgtacgtcactatccaccctgctagtgggtattatcatccccactctatagattagaaaattgaggctaagaatgatgaagtaacatgcccctttttaagtggcagagccaggaagaaaaacccggctggaactgcaaattcccttactttttccactgtcccacactagtgccactagaatatttttaaactgtgactttgaagtaaacaactttcttactgcttccaaagcccaagctggaccaagccacatgctgcttctgggccctcaccacacagtagcattcattcgtttgtgtgcttttcagcaagttgcttgacctttctgggtctgtttccatacccataaaatggggtgaataattcttgcacctcatgggctattgtgagtggttgatgaattaccaaagatggaagcactttgaaaagcgtgtattctggacaggagggcctgccttggaaatggtccagggaaggctcacctctgaggaaaacccagtgcttataggaaacccaccagccccctctgtctccagggcactcacaagggccaaagagaccaagaaagaagtgtagactatgtctccaactcaaggggtaagaaaataaccacttaaaaaggaatatcgatattggatatgcatatatgtgcataaaacacctttgggaaaatacacaaggaactgggacacctcagttgcctctgggcaagggaaccagatggcaagtggcagagtgagggcgacctgcactcagttcctttttgtaccttttgatttttgaaccatgtgaatgtattacctggtcccaaaaaagttaatacataacatttttttttaagtcaatggaaaattcccaccagttttcctttggggagggtggatctgcctctgctgcattcaatgctagctgtcacagagacagcagtagtatatttccaattatatatttaaaagactctaaggcagaaagacttctttataagaaaatcaaatattgtcattcaacaaaaaaaaggaaaaagaggaagaggagaaggaaaagaaggaggaagagaaaagcagaagaatgaaagaaaacaaccacgtaaacaagtgtgttttgacatctctaagcccctatacagaaagctcctgcagctcctccttctctgcatttgccaggggcagatccccaaacctcctgctcagtgctgggcccaaagctgaccggtagtgccttggcatgcaacataacacacttcagcctcagactgcctgagtttaagcctctcccttcacttactagctgtgtgaccttggccaagtaactccctctctctgagccttagtcttattgtctatcaaatggcgacacttacctgtrcctacctcatgggggtggttgcgagggaccaaagagataatgcagaaaagcatgtagtagagcgcatgttatatattagtagtagacactgttcttgctctaaatgtgaacacgctgtgggtaaggaaacttcctggggttccctggcttcaggaattagggaaatagtatgcaaatttgtgtgactgtacatatgtacatttttctggggcacagagccatagctattatcagagtctcaacactcaaaggagttttgtgattacaaaaaggatgagatctacagacgtagaggtaaagacagacataaatagagctgtctaagacaggggcccctcacctcatgatctatgcacacgctagtcctgcttggaatgccccaatcttccctagactggctccttctcctcattcagttgtctgactcaattaaataccctagggccgggcccggaggctcacatcagtaatcccaacactttgagaagccgaggtgggaggattgcttgagcccaggagttccataccagcctggccaacatggcaaaaccccatctctactaaaaatacaaaaatgagctaggcgtggtggcacatgcctgtagtaccaactactcaggaggctgaggcaggaggatgccttgagccctggaggtcgaggcagcagtgagccatgattgcaccactgcactccagcctgggcaacagagcaagaccctgtctcaaataataataataatatggctgggtgtggcggctcatgcctgtaatcccaacactttgggaggcagaggttggccattcacctgaggtcaggacttcgagaccaacctggccaacatggcaaaaccccgtctttactaaaaatacaaaaaaattagccagacttggtggcgcatgcttgtaatcccagctactcaggaaactgaggcaggaaaatcgcttgaacccaagagatggaggttgcagtgagccaagattgtgtcactgcactccagcctgggtgacagagtgagactctgtctcaaaaaatttaaaaaaaaagccgggtgcggtggctcatgcctgtaatcccagcactttgggaggccgaggcaggtggatcacctgaggtcaggagttcaagaccagcctggccaacatggtgaaaccccatctctactaaaaatacaaaaattagctgggtgtgatggcgcatgcctgtaatccgagctactcaggaggctgaggaaggagaatcgcttgaacccaggaggtggaggtcgcagtgagccaagatccgcgccactgcactccagcctgctcgacgggagcaagactccatctcaaaaaaaaataaattaaataaataaataagttataataataatactgtgaccaccctaccctaactaaagtagccatcttgtcctggcaatccccagataccatctatcatttatcattatctatttctctctcctcctctctctctctttttctttctttttttttttttttttttttttttttgagatggagtctcactctgtcgcccaggctggagtgcagtggcacagtctcagctcactgcaagctccgcctcccccaggttcacgccattctcctgcctcagcctcccgagtagctgggactacaggcgcccgccaccacgctcggctaattttttgtatttttagtagagacggggtttcaccatgttagccaggatggtctcgatctcctgacctcgtgatccgcccgcctcagcctcccaaagtgctgggattacaggtgtgagccaccgcgcccagtctcctctctctctctctctcaatacatacttagagaatggtagaactatgtaataagacagagcaatgccttattctaggtattattaacacagaggaggagacaagcaatctagactggggcaaccatgaaggctacaagcaggcggtgacactcaagctgaatcttgggccaggcatgggaggaggcattccaggcaaagggactggaatacatgaaggcaagaaggcacaggaaatttagggaagcaataagcagcttggtgttgctggaacacaggatatttgacggtatccaagcaaaccaactgtaaaaagatgttattaaaacaatgagggaacattggacaggttatgttaagaaattattgataattttgttaagtacaataacagcatggtggttatatacacatatattttatatcctcatcttatagagagataaagagaagtatttatagatgaactgtatctggatgctccagaggaggaaaatgtatatggagggtggggagggagggggacrtgggtaaaacaaaattttaaaatgttgatcactgttaaagtggattgaatgaaaatatgggagttgattatatagtctctctggttttgtggtttttcaattttcataataaaacattaaaatctatattggtgagttgctgcaagtaaagatagcagggaccagatcacaaagggcttcctgtgccaggttggggggctgggcttgagcctgcaggtaaggaagccatcagagttttaagccaaggagtggtctgatcagatttgcattctgaaaagctcgctctggctactgtgtggacaaaaaaataaataaataataaggagcctggtaaggcccagctccaaagtgactgcctgtgagaagcctctgtttacctcagatggagtcctggcaccttcctcctttggcccactatgcctttctcctaaccacttacttggtaagagaatgtgtgtgtgtgtttgtgtgtgtgtgtgtgtgtgtgtgtgtgtgtgtgtgtgtaatgaaatatttcccctcaatatatgcttcaggtaaaaactttcagataatacagataatggttccctcatatccctatacttcagtgataaccactattggcaatttagtgtttttctttccagactttttttcatttgctccataaatattattgagcacctactatgtgccatgcagcgtgccaggcactagggttacatctgtgtacaaacagacaacgatctctgtctcaatggagctggcattatgcatatatgaccatttgacttttatgtaaatgaaatgaaactgttctgcaacctgatttttctttcacttaattatacgccgtggacagctttccatatcaatctagaaacagctactttattcatcttccattataacatatgccagacataccaaaaaggaaggcacacctgatgcttgaaatgatcctattatatggatgcttcaaaatttgtttaacctgtcccctattgctcaacattcagaattttctcaattttccttacaaataaaaacactgcacaacaacaaccactagagctaataaatgaattcagcaaagtagcagggtacaaggttaacaaaaaaaaatccattgtgtttctatacaacaacaatgaataatccgaaaa

SEQ ID NO: 94230 - DNA, 32848 bp, Homo sapiens
  misc_feature (1)...(32848): n = A,T,C or G
ccctcagcacctgcgtttgtcgctgaacgaggagggtcagtgccgggtccagcacctgtggttccagtccattttcgatatgctcgagcacttccgggtgcaccccatccctttggagtcgggaggctccagtgatgttgtccttgtcagctatgtcccatcctcccagcgacagcagggtgagcagagcaggtctgcaggggaggaggtgcccgtgcacccaagaagtgaggtgtgtgtgccagaaagatggggcggggaggggggactatcacaaggagaagctttgcttgggagagcagggtagaggaggctgttgtgcctcggggtttggaagggaaagaaatgcgctgataggacacaggaaggcagaaggctcctggccggagccggggcggcagctgagaggtgggcgggcgcatccccattccatcggatcctctgttccattgtctgtctgtctcctggacccatcctggcctcgtctttgccctccgtcgcagcctggccttgggcctgcccttcccggggacactcggtctgatccccttccctcctccctcaatgtctcatgtccctgtctgatctctccctttcccctgccccaccgtcccatctgtccccacgttgcccctccccccaggccgggagcaggctgggagccatgcgggggtgtgcgagggagatggatgccaccccgatgcctcctgcaccctcatgcccttcggagcgagtgactgtgtgtaagtgtggtcctcctctcaccaccgcccatgatccatcttccatggatggggggttgctcaggagatgggatgtggggagacagccacgctcctggggggctgagtgaaggggaggccacggcaggagctcacctgcctccacaatcagtctgttttcttaccattcctatccagaaccgaccacctcccatgacccaccccagccccctgaacccccttcatggacagatcccccacagcctggggcagaagaggcgtcgagggcgccagaagtggcggcagcagcagccgcagcagccaaagagaggcaagagaaagagaaagcgggcggtggaggggtcccggaagagctggtccccgtggttgagctggtccccgtggttgaattggaagaggccatagccccaggctcagaggcccagggcgctgggtctggtggggacgcgggggtgcccccaatggtgcagctgcagcagtcaccactagggggtgatggagaggaagggggccaccccagggccattaacaaccagtactccttcgtgtgagccaaccccacccgctccaccctttttaaaccccccagccctgctcgtgagattgggctgggtagggacagaggaggccgaaatccctcccccatgcttcctgacccttgttggccaagggcatctttgatggtacaagcagaggctcgggagaggctcccgtcacacactacaggtcccctccccagggcaggggatttgkgctccatgagctccttgaggggctyttytggtcagccccaccctgggggccatttccccattaactacccccagcccgaggcagggtgagggggaagggctgtcagttacattaaggtggttgttgttgttgttttaaacaaaatggagaagcataaataaataaaaaggtttatctcggttctatcgtgatggctatggccattgtttgctgtggggactggggacagttgggttgggaaggcagcccactcagtgcccacaggccagagggctggcccaggccagtccccatcattctgcagtgctgtgctttcggagccatccctgtgtctgacagccttgttcgtggagcactaaatgatgctcttggggtctcctgcgagtttttgtcatgggacagtgctgtgaatggcaggcatggtgatctccagcggcccttcctgagttatggctttgtaccctagagagagctggcagtgagagatgggaggcacggtggctgtgctggaagagattgaacgtggcagtcacagggtagccgcagaggggcccaatggcccccttctcaaagccaggctggagggatggcagagggcactagcttctgtcctggccttgccactcactggcctgggcaaggtgtagccacgccgggcctgagcatcctcatctgtgacatgtgaagtttcatcttgagtcagagctgctgacatggtttgcttggcctggacatggtgtccatttgagtttcacattaaaaattcagatcacaggccaggtgtggtggctcacgcctgtaatcccagcactttgggaggccgacgtgggtggatcacctgaggtcaggagtttgagaccaggctgaccaatgtggagaaaccccgtctctactaaaaatacaaaaaattagccgggtgtggtggtgcgcgcctgtaataccagctactcaggaggctaaggtaggagaattgcttgagcccaggaggtggaggttgctgtgagccaagatcgcaccattgcactccaacctgggcaacagagcgagactctgtctaaaaaaaaaaaaaaaaaaaaaaaatcactggcttctcttaaannnnnnnnnnnnnnnnnnnnnnnnnnnnnnnnnnnctcttaaaaatcagaagatccagtgatgtgggtccacttccacatctgccccatccccaccagctcactttgctccctgggagggcctggccctgtgggcatttgagtttataacaccacccccattgtggcacacccctccaccccgtaaaacacaggctctgctcttggaatcagtcttcctgatctgtggctgtgccctccaacagagggcacccctgggcttcccagctctgggggtagtgggtgccaacaaggaggggcctggggctgaagaatcccacccgctgagctcggccttctcccttccccactgtccagctccgcctttcagcatcctgcctcactccccgcccaggcagcaaggagcccacaccctcatgcccctcagcttcagcccccacctccaggaggccctacccacgctcatgaccttgctattctgggccttgtgtcctgtagggagatggacaggagacagctgggcttccaggccacccaggcggggggctagccgagggaagcctgctggctctcctgcttgctctaatttctggggctccccaaaccttggcctcaggagactggggataggaccggccttgaaagtgggggaagctttggagagccgggtgctgggttcttagtgagatggccagtgaaggctgtggtgccccgaggtaagcagggcctgatcccctcctaatcttccagcagcaactggtgctctgaggctccccctcccccagccctgccagccttcagggacctgccttccaaagatgggcaggggagggggacgaggacacccacccactcctcagaccagcatgtcttggctgttggggcctgagagactttccctctaagcctttctttacagatggttaaaccgaagttctgcactcatcagggactggccagggtgtctctgtgtcccatgcttttagctccagccctcaggtgtgacaggaggatcactttccatccctgggcgtggagacccctgtgggaagggatccccgagggcgcctctggctcagcctccctccatggcagttcacacccacagccttccctagagcagcccttctgcagctcctggcgggtggctttccctccctggcttgtttccccctctgggaagccgggggaggtagaaatgaataaccttaaaggcctgttggcaggaatgtgctgccaagcctgccccctgccctctgtctcaggctctcgactccctcgaagctgcccatctctccgtctgcccctctccatgtttgggcattcccactgctgtaagacagtagcccctgtcactcctccaggtgccggtggggagacgccggccagcgccaaaagccttggcgggtgtgagcctgagtccagcggagacggtgggtgctgggccgggtggaggtgccgggggctgtgtctcttggaagagaggctgctaatgctctcctgcacccccaattcagcccactgtcccccactcccctcaggtcacagcaggattctgcttcaggggaggggtttgttggaactgtgaaaaggaggcaggaaggagcaccttgtcctcaactcacccaggaggccgcgcctcacccaagtccaggcagaagggatgcatctgggaggctgaaccctcaagttccatccacccctgctgccatccccctccccaaaagtgggggcctcccttttctttgctctgctgtctcctattctgtcctctgcttcggagtttgagccccagaatggaaagcagccttaagaagccacacttaggaagtccacatgcctctgctcatttcaggaaacaggcctagacagaggacggacttgagcccagggcaccaggccccttcccctcactgacctttcaccctgactctcatccagcctttctgcctgcctgtcctccccttcctgcacccctggtaccctccctcggctcctccagcagctgccytggtggtaaccaagagacgcccccatcctggagcaggggtggggaggggcagctcagagcagctgcttctctgaggaagctgacaccaaggccagcattcagcaacaacttgtggctttgcacccagcgccggggtccccgcccacctggctccctgctgtccctcttccccactgctgctcggacttccctctgaccctggtggctctgtgtctctgctccctttccccctaggtctagacatctgtccttatttcccccagacctgtccccagaagtccacccttccccattcctttggtctggagcccctgcttggtccagcttccccaggccccgacacctttctgtggggtctgcctagctcctgcacgcacacagcatgggcctgatcctgttcccctcgtggacagatgcagcagggcagagtgcagcgcagaccacaggcctctggggctggccacagaaaccccgttggttagagcacagtgtgggatgaggtgaccctcagtgcacgacttggggtgacccctgcccccatcctgagacagttacccctccccctctgccatcagcacattctgtagcctcttgggttacttgnnnnnnnnnnnnnnnnnnnnnnnnnnnnnnnnnnnnnnnnnnnnnnnnnnnnnnnnnnnnnnnnnnnnnnnnnnnnnnnnnnnnnnnnnnnnnnnnnnnnnnnnnnnnnnnnnnnctttgctcaccagggcctggacactaaatcccttgttgatggctgtggcaacccctccctagggtagggttaccatcttcggccctgtccccttgactctctcccctcacttccccttgtccctctaggagccactcacttcctctagcccccaaaagatgttctcccttcatcagtcccccaaaggcttggggtatctctgccactgcttcagcaaatggggtgaggaggaaggagactgcggcaatggaaacaggctccgggcagatgaggcaggaaggggggtgtgaggaaagggacaggtgaggccggggatggaagagggctccgggaagaactggggggatgagtttggaatgggaaattcaatgcagctggggaagtcgaggcaatgggggggcagggtcagtagcagatgacagaaagtgaagtctctccctaccccacttccctggggctggggctacctttgcgtccctcatgagtgacatctcaggctgcagccccactgttccccctctgtcagcagaaatatctctcttttctgaccacctcctgctggagtctcagccagccaatccctgatctggtggaggggggagcccggcctccccctgctccctcataaggaccagctgggggccggggggtggccggctgctcaagtgggacgggggtcagagctttgtggagggaagaaaaacctggagggggcaggagagtaaaaagaagaaacccaggcagacaggcagttggacacactgaggaagaccccccacgagtgggaaccccctggaaggaacacaccggccccggcccccaggaagggagcacaatggaggccgctcatgctaaaaccacggaggaatgtttggcctattttggggtgagtgagaccacgggcctcaccccggaccaagttaagcggaatctggagaaatacggcctcaatggtaagtgtcccttggaagagmggctggtaattaatgccctcctgcacccccaaaacacacgcacacgcatgcacgcgtttctcccttcagggtttcttaaggaagagctgggccgttgtccaatgctcgcagggggaagaagatactgagaaaacagagtcccgagatccagagttttgggaggttttaatgggatgaacttgatgaacctcaaggtggcctgattctcttagccacaaagtcttgggtgtggggggcatgaggctgaaccccaaatgaatctgtccttttcttctttttcctgggtagagctccctgctgaggaaggtaagttactggaatccctgaactctcataaatgaccaccccccaccccgccctgtcccactccctcctccctgcctctttagattctttgagcaaatatcccttcccaaaaggcaaatctccctccctaaaggttagagtcctgtccggggcagaagtctcccaggcgctttctccttgaagcagccaacccttgaactgccccccactttgccgagtctgtttctggactccaggcgagcttcttagcccttctctgggcaccaagctgtctgcccaccaccctagagcctccccactgcaggccggagtccagggcgctccatcccagaccttcacccactagaccttaacccggggccctccccttgcctcctcccccagggaagaccctgtgggagctggtgatagagcagtttgaagacctcctggtgcggattctcctcctggccgcatgcatttccttcgtaagtgtgggagggtctctgggggctggctgggggtgtgaggctgggatcgggcgaatgcggggctcgcagtcactggatcctcccgtccgagtcccragcatcccattgtacagacggggcgggctggcgcgcagcagcgggtgtgattcgcgtcctcctctctcctcccctgcaccccagaggcaggttttattttaagctttaagggtgttctcagccaaaacaccgaagctaagccaccctcgcggcttcaagagcttggagagctcgggttacccacccgaactccgggctccgggtcccgccgcgatgccggctgcggcgcggggggccactgccactcccggcatgcgccgggcggacggccgctccaccaatccccgcgcccgtcggcgcccctgccccgccctccccagcctcctgacgctgattggtcgaggggaggactcgctcctagtggcgggaaagcgcggcggtgtgatgatgactccaaggagcccggcgcccggtcagggagggcactggcatccctcattacccgcccagcctggccttagcccttccccgcgctccctaggcacccccacccccgcagggcatctccagggctctgcctcctctcccgccctgggggctactccccatcccgcggtccatctgcatgtcgcgggttcttccgcagcatgtgagcctcgctggggactctggaggcaacgaaagcctccctgtgccttggtctccgaacgcaggccccgtcgcgttaagcacaagctggcagggcctctcctctcccttctcagatttgctccttgacatttgcctgctgcctggcggtggcaacagctggggcggggcgcgcgcaggaggccccgtaaccctatccccgctccggctccctcgtgaaaccggagcttccctgccttggccgagggggagggctgcgggggccagaccgcctgcgaagaccacagggtttttcctctcgggttttggctcccgtgggatggatgtggctgtgcggggggttggcctgagcttcgcttctaagccagcagcttggtcagggaaacctgaaagcattcccagctaatcccccaagtggtgcaagtctgtgcgcgcccatcccgctgagtaaggcggtggcaggacctgcagtggatggacagaccctcagacggatgtggggccacagcgccccgacggtgcccggccctcctgctggctcctgcactctcctgcacagttctcccctttgcagtggtccacttcctttctccatctgttttggggcctcattacctgtcattctcctttcccctgctccccaggtgctggcctggtttgaggaaggtgaagagaccatcactgcctttgttgaaccctttgtcatcctcttgatcctcattgccaatgccatcgtgggggtttggcaggttagcgttgacccttccttaccccttcatgtcccaacagtgaagaagaggccaaccctccctccagtctcctcctcctccatcacctcccccatacttgcctcttcctctggtcctatcccctggtctggaatgggatggagtgtggggaagaggtgggagactgtgacccactgtcacttcctggctatgtgaccctgagcaagttccttcatccctctgagcctcagtttcttcatccataaaatggggctagcaatccagtgtgaaatcgactaagatgatgcatgttcctggcacacagtaggaattcaatagacgctagcttgatttccttcttccactgacctgaccaccccctacatgtcctgtcctctgcttcctggtttgttttgttttgttttgtttttaggtcatttccaaagtgaaaacccaaatgctaccttgctttggttttaagaaatgtcaggctataagccattttttggtgctcactggtttctgaacactgaggatagaaatagccactttcatactttgggaggccgaggcgggtggatcagttgaggtcaggagttcaagagtagcctggccaacatggtaaaaccccatctctactaaaaatacaaaaaaattagctgggcatggtggcaggtgcctgtaatccccagctactcaggaggctgaggcaggagaatnnnnnnnnnnnnnnnnnnnnnnnnnnnnnnnnnnnnnnnnnnnnnnnnnnnnnnnnnnnnnnnnnnnnnnnnnnnnnnnnnnnnnnnnnnnnnnnnnnnnnnnnnnnnnnnnnnnnnnnnnnnnnnnnnnnnnnnnnnnnnnnnnnnnnnnnnnnnnnnnnnnnnnnnnnnnnnnnnnnnnnnnnnnnnnnnnnnnnnnnnnnnnnnnnnnnnnnnnnnnnnnnnnnnnnnnnnnnnnnnnnnnnnnnnnnnnnnnnnnnnnnnnnnnnnnnnnnnnnnnnnnnnnnnnnnnnnnnnnnnnnnnnnnnnnnnnnnnnnnnnnnnnnnnnnnnnnnnnnnnnnnnnnnnnnnnnnnnnnnnnnnnnnnnnntgggattacaggcgcgtgctactacgcccggcttttttttttttttttttttttttttgtacttttcgtaaaaacggacggggtttcaccatgttgtccaggctggtctcgaactcctgacttcaagtgatccgcctgcctcagcctcccagagtgctgggattacaggcgtgagtcaccatgcccggcctgattttctttgattcttctttgttccctccccaaaaccctctcacctgttttcacctgtaggtgacagtttcctcaacatacacacacccctgcctgtgtggggttttgttgcctcccccgtgccaggagccacaactccataactctgcctcctgtgtataaccctgcctcctccaccctgtctcctcaggagcggaacgcagagaacgccatcgaggccctgaaggagtatgagccagagatggggaaggtctaccgggctgaccgcaagtcagtgcaaaggatcaaggctcgggacatcgtccctggggacatcgtggaggtggctggtgagtgacagggacggctggtccaggatgggaggccttggggctgaggcctaggagatgccgggggctggtcaggctcggatccaggtgtccaggaggatgacggagtctgcttctctttccgactcctcagaaggtcatcccaggccactccggccacatccccccctccccagcggagtctcagcaggaacagccagtcctgtccctgaggctgcaggcagaccccctgctccccatcctctcaccctgcacttgcactcgcaggcaacaggtggaacccggtccctgccaatggccccgtctccaccccctcccgggcctggcttccccctccttccacccaccccaagcttggtcagctttcagtcttgacctctctgtgcccttgaggcctctcaaaggggaaggagcgagggcagaagggaggagggaggccgaaggctcgagcccccgaccatgtaagggaaactcaggcctggcacagagcacgcgaccggggaggagggagctcaaggagggccccgcccgcggcaagggacacttaatgcctggccagggaggggtgggggccgggtggctaagattactgggattctgcccccttcagcggtttttatgtttgccctgagcaggccttcccgaagctccaggcccctgccagggggaatggctcttcagaggcctccttccctgtagcagacatccgaatcaccaccccagggagcttgggcagagggagtgagggcaggctgaagaccccagcgccccatcacagggcagccttgccgccgtgacagcatggagtcagcgccatgaatgtctataaatatcacgcgggcttgggtgacagggtgtcccgcccgactctatcccgacctccctcctccctcctcggtccatttcctctggcacaggagggatccttagaaacagagggaaaggaaagcgattggaccctgtccccagtaccatccgtgggaccagtgcggaattaggcagcggccctgggagattcttagcctcctcctaaggtctctgagtctggctgggcatccacctctccagccccccgacaaggtggtttccatggcctgccagcccacctgtgcgtctccctggcctcacctccacccattcactctccagcctgtgctgcccgccccactcttccacacctgtttcctgcccaacccccgcttctctcctgtcccatcccatcctgtcttgtccatgtccccagctcactctccctggctccccgcctccctgcctccctgagatgctcagaccrggctgtcaggttcccgatatgtggtcctctccatgaccaccctgtgccccccgctgccttgagtcctgcccactcataccttccgctcactcctctcctgccttgccctccactgttcctcttggttgccctcgattttctcaatttccatattttcccgtttctccttgccttccctggctgtccacttcattctctcaccccgacaccccttctctctaatgcaccctgttttccctgagttctttccttgcctttcctccttgcctttctcactcctgtctcccaatctcaattatagcttcttgtcctacagctggactgtccctaatttcccctccagtcattcagtgggcatttattgagcatgtactatgtgctgagcagtacacctgcccatcccttctcagggctcacagccagtgggaagagatgtgggagttcaagaccagcctragcaacasagcgagactccatctcgccgtggacacgggggcagaagggatgggtgtcacgatgaggggttgccagcttcaggagctcaagccaagggcctgatgcaagccctgggagcctccctgagacctgaaggatggatgaggagaacgagtcagacacagattgggtttttctttggaaggaagaaaattccattcccaagtgacctccctcttccctactctctccacagtgggggacaaagtccctgcagacatccgaatcctcgccatcaaatccaccacgctgcgggttgaccagtccatcctgacaggtctgctggcctgggtgggaagatgcatgggggtgggaygtggggaggaagaggcaacaagggggaggtgagtggaaagacagagaaccctcactgtctgagcaacataaagagaccctgtctctacaaaaaaattttaaaaactagctgagcatgttgttgagtgcctgtagtcctgactactcaggatgctgaggcaggaggatcgcctgggtacaggaggtcaaggcagcagtgagctgtgatcacaccactgcactccatcctgggccaccctgtctctgtcaaaataaaaacaaaaggctgtgcgaggtggctcatgcctgtaatcccagcactttgggaggccgaggtgggtggatcacctgaggtcaggagttagagaccagcctggccaacatggtgaaaccccatctctaccaaaaaatacaaaaaacacaaaaattagccaggcgtggtggcaggcacctgtagtcccagctactcaggaggctgatacagtagaactgcatgaacccaggaggctgaggctgcagtgagccaagatcatgtcactgcactccagcatgggcaacaagagcaagaccccatctcaaaaaaaaaaaaaaagacaaaacaaaacaaaacccagcactggggcctccccctggctcgctagtagtggctgtggcagtggcagcactgcttgacattttcttttttttttgagatggagtcttgctctgtcacccaggctggaatgcagtggcgcgatttcagctcactgcaacctctgcctcctggcttcaagcaattccctgcttcagcctccagagtagctgggattacagacgcccaccatcacacccggctaatttttgtatttttagtagagacagggttttaccgtcttggccaggctggtcttgaactcctgacctcgtgatccacccacctcagcctcccaaagtgctgggattacaggtgtgagccacccactgcacctgacctgcttgacgtttccattctgtcccaagcctgaaacgggacgggtagtgggagaaggctggatgttgttgcctactctctagatagccaccagcccaccccttccacatggacatagggccacagacacctcgagaactgtcctgtctccttcagcctcctcaaaaatcctccagggaggagccatgagattctaggacaagatagggggttcagatacactgaaaaccatggctgctaggctgggcgtggtggctcatacctgtaatcccagtgctttgggaggctgaggcaggagaattacttgaggtcaggagtttcagaccagcctcggcaacacagcgagaccccatctctataaaaaaaaaatttttttaactagctgggtgtggtggtgtgcacctgtagtcccagctacttgggaggctgaggtgggaggattgcctaagcccagaagcttgaggccacagtgagctatgattaccacggcagtccagcatggacaacagagcaagaccccatctctataaaatttttttaaaaattagctgggcattgtactgcacacctgtagtcccagttgtttgggaggctgaggtgggaggatcacttgaacccaagagtttgaggctgcaatgagctatgatcacaccactgcgttccagcctgggcaacagagcaagaccctgtctctgtaaaaccaccatagctgcttctgtttccgcactggcagggagaagcgaagaagaggcagaaaacattccccatggtcccagggggcaagggctaggctggcccaggcttgctgctgagcccctgctcttagggtgagggaggcatggtcgtaagtgtaggtcccccttcctcccagaaacatgcttgacagttaaaagtgtggctccaaatatgtccacttatttgattttcacccaagacattgttttgcagtgtacatgtccttgtccccattttacagaggagcacatggaagttaggtgatcaaacacagcttgttagtggtcaagctggggcttgggtcgaggtctttttaagagccgtggacttctggctgggcacggtggcctgtaatcccagcactttgggaggctgaggtgggcggatcacttgaggtcaggagttcgagaccagcctggccaacatggtgagaccccgtctctactaaaaatacaaaaaaaaaaaaaaaattagccaggtgtgacagcatgtgcctgtaatcccagctacttgggaggctgaggcaggagtattgcctgaacccgggaggttgcagtgagctgagatcttgacactgcactctagcctgggtgacaagactgcaactctgtctcaaaaaaaaaaaaaaaaaaaggagcaatggacttcctagctgccttcagtggcttcttccagagtccagacatcccccaggatggctacttggtccttaccaggagctgtcctgctgagcagggagagagttaggcacgggaagcctgggagaaggacatgatgtcatccgaaaaccccttggccccttctccacaggcgagtctgtatctgtcatcaaacacacggagcccgttcctgacccccgagctgtcaaccaggacaagaagaacatgcttttctcggtgagcaatccgggaccagccatcacacactcagtcaagccaggtgcccgggttggagagaaacatggcgtgtgagaagagatggcrtggggagatgcggcatgagggtcacctcttgcctgattccctgcctcctctttcccttcccagggcaccaacattgcagccggcaaggccttgggcatcgtggccaccacyggtgtgggcaccgagattgggaagatccgagaccaaatggctgccacagaacaggacaagacccccttgcagcagaagctggatgagtttggggagcagctctccaaggtcatctccctcatctgtgtggctgtctggcttatcaacattggccacttcaacgaccccgtccatgggggctcctggttccgcggggccatctactactttaagattgccgtggccttggctgtggctgccatccccgaaggtatgaaagcctttcttttctcctcccatttgctaatcccatctgcaaagaccccttttcttttcttttcttttctttttttcttttttgttttttgagatggagtcttgctctgtcacccaggctggagtgcagtggcgtgatctcggctcactgcaagctccgcctcgcgggttcacgccattctcctgcctcagcctccctagcagctgggactacaggtgcacgccgccatgcctggctaatttttttatatttttagtagatacggggtttcaccgtgttagccaggatggtctcgatctcctgacctcctgatctgcccgccttggcctcccaaagtgctgggattacaggcgtgagccaccgcacccggccttgctcagtgcaacctctgcctcctgggttcaagtgattcttctgcctctgcctcccaagtagctgggattacaggtgcacgccaccatgcctggctaatttttgtgttttcagtagagatggggtttcaccatgttggccaggctggtctcgaactcctgggctcaagcaatccacccgcctcggcctcccaaagtgctggggttacaggtgtgagccaccacgcctggcccaaagaccccttttccaagtaaggtaacatttacaggctccagggattaggatctggtatctttgcggaccattattgtttgtttgtttaatagagacagagtctcactcttgttgcccaggctggagtgtggtagcacaatcataactcactgtaatctcgaactcctggattcaaacaatcctcttgtcccagcctcctgggtaactggtaccacaggcaatcaccaccacacccagctaatttttaaatattttcagaggagtctcactgtgttttccaggctggtctcaaactcctggcctcaagtgatcctcccgcctcagcctcccaaagtgctaggattataggtgtgcaccaacgtgcccagctgggggctactatttagccccttgcaggttccctcacaccctccccttgcaggttccctcacaccctccctccctccccacaggtcttcctgcagtcatcaccacctgcctggccctgggtacccgtcggatggcaaagaagaatgccattgtaagaagcttgccctccgtagagaccctgggctgcacctctgtcatctgttccgacaagacaggcaccctcaccaccaaccagatgtctgtctgcaaggtcaggagcagtgtgggcagcgcgctcagtcagaaggctgcctgtgggggttaaatgggccctccaaagatagaggtctcccttcatcactgctggcttctcatctgggcctgcaaaatgctcaaagggcagtagaacgccatcctgtctgccatgaacgggatcagagaggacccttgtgccccagccagacagctcactctgaccaccatccacgcaccaggcactgccacacatcgtctctcatccctcacaatagcccattcagaggatggtctcattatcttcatttttttaattaaaaaaaattattattattttgagacagagtctcactctgtcgcccaggctggagtgcagtggtgtgatcttggctcactgcaacctctgcctcccgggttcaagcgattcatctgcctcagcctccctagtagctgggactacaggtgcctgccaccacgcctggctaatttttttgcatttgtaatagagacagggttcgccatgttggccaggctggtcttgaactcctggcctcaagtgatgtgcccctgttcgcttcccaaagtgctgggatgataggtgtgagccacggcacccagcctaacttccttttttagaggaggaaaaagcctctgagagattaaatgacttcccccaagatgcacagttaataaataacagagttgagcttcaaacccgagtctgtgtggccccagagcttctgcctgtgaagtagatggctctccagaatggtcactcatgacagggcccggccagactgccaacactgaccgtgaacagcatttcctaaagcagggctcttaatcttttctgtgcctcacacccctttgcagttgagctcttgtcaggataatatttcaaatgtatattaataaaataaaacaggccaggtgcaatggctaacgcctgtaatcccaacactttgggaggccaagataggcagatcacgaggtcaggagttcgagatgagcctggccaacatggtgaaaccccatctctactaaaaatacaaaaattagccgggcatggtggtgcgtgccagtaatcccagctactggggaggctgaggcaggaaaattgcttcaacccgggaggcagaggttgcagtgagccgagatcgcgccactgcactccagtgtgggcgacggagtaagactgtcttaaataataaaatgaaatgaaatgaaataaaataaaataagccaggggtggtggctcacgtctgtaatctcttcaggaggccaaggtggaaggatcacttgagcccaggaattcgagaccagcctaagcaacatagtgagagtccgtctctaccaaaaaaaaaaaaaaaaaaaaaaaattagcctgatgtggtggtgcacacttgtagtcccagctactcaggtggctgaggcaggagaatcacttgaacccagagattgcttgagccaggaagtcaaagctacagtgagctgtgatcacaccactgcactccagcctgcatgacagagcgagaccctgtctcacgcacaaaaaaataaaataaaatagggctaggtacggtggctcacgcctgtaatcctagcactttgggaggctgaggcggaaggatcacttgagcccaggagttttagactagcctgggcaacacagtgagaccccaccttttaaaagataaaatagaaagtaaaaaataaataaacaaaacaggattctgggtttttttgtttgtttttttttgttttttgagaatggagtctcactctgttacccaggctggagtgcagtggcccagtctcggctcactacaaccttcacnnnnnnnnnnnnnnnnnnnnnnnnnnnnnnnnnnnnnnnnnnnnnnnnnnnnnnnnnnnnnnnnnnnnnnnnnnnnnnnnnnnnnnnnnnnnnnnnnnnnnnnnnnnnnnnnnnnnnnnnnnnnnnnnnnnnnnnnnnnnnnnnnnnnnnnnnnnnnnnnnnnnnnnnnnnnnnnnnnnnnnnnnnnnnnnnnnnnnnnnnnnnnnnnnnnnnnnnnnnnnnnnnnnnnnnnnnnnnnnnnnnnnnnnnnnnnnnnnnnnnnnnnnnnnnnnnnnnnnnnnnnnnnnnnnnnnnnnnnnnnnnnnnnnnnnnnnnnnnnnnnnnnnnnnnnnnnnnnnnnnnnnnnnnnnnnnnnnnnnnnnnnnnnnnnnnnnnnnnnnnnnnnnnnnnnnnnnnnnnnnnnnnnnnnnnnnnnnnnnnnnnnnnnnnnnnnnnnnnnnnnnnnnnnnnnnnnnnnnnnnnnnnnnnnnnnnnnnnnnnnnnnnnnnnnnnnnnnnnnnnnnnnnnnnnnnnnnnnnnnnnnnnnnnnnnnnnnnnnnnnnnnnnnnnnnnnnnnnnnnnnnnnnnnnnnnnnnnnnnnnnnnnnnnnnnnnnnnnnnnnnnnnnnnnnnnnnnnnnnnnnnnnnnnnnnnnnnnnnnnnnnnnnnnnnnnnnnnnnnnnnnnnnnnnnnnnnnnnnnnnnnnnnnnnnnnnnnnnnnnnnnnnnnnnnnnnnnnnnnnnnnnnnnnnnnnnnnnnnnnnnnnnnnnnnnnnnnnnnnnnnnnnnnnnnnnnnnnnnnnnnnnnnnnnnnnnnnnnnnnnnnnnnnnnnnnnnnnnnnnnnnnnnnnnnnnnnnnnnnnnnnnnnnnnnnnnnnnnnnnnnnnnnnnnnnnnnnnnnnnnnnnnnnnnnnnnnnnnnnnnnnnnnnnnnnnnnnnnnnnnnnnnnnnnnnnnnnnnnnnnnnnnnnnnnnnnnnnnnnnnnnnnnnnnnnnnnnnnnnnnnnnnnnnnnnnnnnnnnnnnnnnnnnnnnnnnnnnnnnnnnnnnnnnnnnnnnnnnnnnnnnnnnnnnnnnnnnnnnnnnnnnnnnnnnnnnnnnnnnnnnnnnnnnnnnnnnnnnnnnnnnnnnnnnnnnnnnnnnnnnnnnnnnnnnnnnnnnnnnnnnnnnnnnnnnnnnnnnnnnnnnnnnnnnnnnnnnnnnnnnnnnnnnnnnnnnnnnnnnnnnnnnnnnnnnnnnnnnnnnnnnnnnnnnnnnnnnnnnnnnnnnnnnnnnnnnnnnnnnnnnnnnnnnnnnnnnnnnnnnnnnnnnnnnnnnnnnnnnnnnnnnnnnnnnnnnnnnnnnnnnnnnnnnnnnnnnnnnnnnnnnnnnnnnnnnnnnnnnnnnnnnnnnnnnnnnnnnnnnnnnnnnnnnnnnnnnnnnnnnnnnnnnnnnnnnnnnnnnnnnnnnnnnnnnnnnnnnnnnnnnnnnnnnnnnnnnnnnnnnnnnnnnnnnnnnnnnnnnnnnnnnnnnnnnnnnnnnnnnnnnnnnnnnnnnnnnnnnnnnnnnnnnnnnnnnnnnnnnnnnnnnnnnnnnnnnnnnnnnnnnnnnnnnnnnnnnnnnnnnnnnnnnnnnnnnnnnnnnnnnnnnnnnnnnnnnnnnnnnnnnnnnnnnnnnnnnnnnnnnnnnnnnnnnnnnnnnnnnnnnnnnnnnnnnnnnnnnnnnnnnnnnnnnnnnnnnnnnnnnnnnnnnnnnnnnnnnnnnnnnnnnnnnnnnnnnnnnnnnnnnnnnnnnnnnnnnnnnnnnnnnnnnnnnnnnnnnnnnnnnnnnnnnnnnnnnnnnnnnnnnnnnnnnnnnnnnnnnnnnnnnnnnnnnnnnnnnnnnnnnnnnnnnnnnnnnnnnnnnnnnnnnnnnnnnnnnnnnnnnnnnnnnnnnnnnnnnnnnnnnnnnnnnnnnnnnnnnnnnnnnnnnnnnnnnnnnnnnnnnnnnnnnnnnnnnnnnnnnnnnnnnnnnnnnnnnnnnnnnnnnnnnnnnnnnnnnnnnnnnnnnnnnnnnnnnnnnnnnnnnnnnnnnnnnnnnnnnnnnnnnnnnnnnnnnnnnnnnnnnnnnnnnnnnnnnnnnnnnnnnnnnnnnnnnnnnnnnnnnnnnnnnnnnnnnnnnnnnnnnnnnnnnnnnnnnnnnnnnnnnnnnnnnnnnnnnnnnnnnnnnnnnnnnnnnnnnnnnnnnnnnnnnnnnnnnnnnnnnnnnnnnnnnnnnnnnnnnnnnnnnnnnnnnnnnnnnnnnnnnnnnnnnnnnnnnnnnnnnnnnnnnnnnnnnnnnnnnnnnnnnnnnnnnnnnnnnnnnnnnnnnnnnnnnnnnnnnnnnnnnnnnnnnnnnnnnnnnnnnnnnnnnnnnnnnnnnnnnnnnnnnnnnnnnnnnnnnnnnnnnnnnnnnnnnnnnnnnnnnnnnnnnnnnnnnnnnnnnnnnnnnnnnnnnnnnnnnnnnnnnnnnnnnnnnnnnnnnnnnnnnnnnnnnnnnnnnnnnnnnnnnnnnnnnnnnnnnnnnnnnnnnnnnnnnnnnnnnnnnnnnnnnnnnnnnnnnnnnnnnnnnnnnnnnnnnnnnnnnnnnnnnnnnnnnnnnnnnnnnnnnnnnnnnnnnnnnnnnnnnnnnnnnnnnnnnnnnnnnnnnnnnnnnnnnnnnnnnnnnnnnnnnnnnnnnnnnnnnnnnnnnnnnnnnnnnnnnnnnnnnnnnnnnnnnnnnnnnnnnnnnnnnnnnnnnnnnnnnnnnnnnnnnnnnnnnnnnnnnnnnnnnnnnnnnnnnnnnnnnnnnnnnnnnnnnnnnnnnnnnnnnnnnnnnnnnnnnnnnnnnnnnnnnnnnnnnnnnnnnnnnnnnnnnnnnnnnnnnnnnnnnnnnnnnnnnnnnnnnnnnnnnnnnnnnnnnnnnnnnnnnnnnnnnnnnnnnnnnnnnnnnnnnnnnnnnnnnnnnnnnnnnnnnnnnnnnnnnnnnnnnnnnnnnnnnnnnnnnnnnnnnnnnnnnnnnnnnnnnnnnnnnnnnnnnnnnnnnnnnnnnnnnnnnnnnnnnnnnnnnnnnnnnnnnnnnnnnnnnnnnnnnnnnnnnnnnnnnnnnnnnnnnnnnnnnnnnnnnnnnnnnnnnnnnnnnnnnnnnnnnnnnnnnnnnnnnnnnnnnnnnnnnnnnnnnnnnnnnnnnnnnnnnnnnnnnnnnnnnnnnnnnnnnnnnnnnnnnnnnnnnnnnnnnnnnnnnnnnnnnnnnnnnnnnnnnnnnnnnnnnnnnnnnnnnnnnnnnnnnnnnnnnnnnnnnnnnnnnnnnnnnnnnnnnnnnnnnnnnnnnnnnnnnnnnnnnnnnnnnnnnnnnnnnnnnnnnnnnnnnnnnnnnnnnnnnnnnnnnnnnnnnnnnnnnnnnnnnnnnnnnnnnnnnnnnnnnnnnnnnnnnnnnnnnnnnnnnnnnnnnnnnnnnnnnnnnnnnnnnnnnnnnnnnnnnnnnnnnnnnnnnnnnnnnnnnnnnnnnnnnnnnnnnnnnnnnnnnnnnnnnnnnnnnnnnnnnnnnnnnnnnnnnnnnnnnnnnnnnnnnnnnnnnnnnnnnnnnnnnnnnnnnnnnnnnnnnnnnnnnnnnnnnncctgaatttctagctcttcctgcaaaactggaagatctggccacatgcagctggagctgtagatggtccaggtgccaatagttgggctgtttgccacagtccccaccataccttattgtgttccatcttattttattaactggtctacagaagctccagcacagcacagcctgcggtcactcgtttgtgggtttttttttgttttttttttttttttgagtttggctcttgtcgcccaggctggagtgtaatggcacgatcctggctcactgaaacctctgcctcccaggttcaagcgattctcctgcctcagcctccagagtagctgggattacaggcgcgcaccaccacacctggctaatttttgtatttttagtagagacggtttcatcatgttggccaggatggtcttgcactcctgacaggtgatccgcccacctcagcctcctaaagtgctgggattacaggtgtgagccacctcgcccagcctcagtaactattgttttaaggctgttgatagagaatgattgcaacagcttggtgggaagtgggtagggtatacgggggggatgaggaggggtgagtaggagggaaatggtgggaaggtaggtgttggcagtgcaggcctcccttgatgcaggtgcccaccttgggatgggaagaggtggacatctgtgtgcctgcccttctcccctgcagatgtttatcattgacaaggtggatggggacatctgcctcctgaatgagttctccatcaccggctccacttamgctccagagggagaggtgtaagtcacccaggcatcttctccccagctcctcacgccccttcccacaccccctttctccctggggccctccatgtggttttgctctcctttcactctcctcttcctccccgaccttgttctctctcctgatatccgagttggctctccccactgtccttccttaccctctgctgcctgctcttcctgtgccctctctgcatctcattccctgttcttctccactgtctctgtcccttcctcccctgaccctgctgccagcttgaagaatgataagccagtccggccagggcagtatgacgggctggtggagctggccaccatctgtgccctctgcaatgactcctccttggacttcaacgaggtaacctctccttccccttccagttggctcagagtctgggcctcctccgaaggccaggaggaaagggttggaggaaggggacccagtacacccagccctctgccagggtgcaagggaggcagtggtttgcttccttcttacgctaggtggaaggasggtatgacaggtaggagcctggggcaccgacttcctcttcctcctctgcccatctcaggccaaaggtgtctatgagaaggtcggcgaggccaccgagacagcactcaccaccctggtggagaagatgaatgtgttcaacacggatgtgagaagcctctcgaaggtggagagagccaacgcctgcaactcggtgagcctgcggagcccctgccacagggccgtctccactctatgctgcatagactagaggaaggcagaggccctggttgggcagagcctagtgcctgtgctgggaccccacccaggcagcagacagcccctgcagcttctccacaggctgatgtgggtgggacccattgtccctggggctgcctggcggccatgcccttgatgaatctatgatcacttctgcccgctgtgtcctgatttgaagtggacaaagctggacacggaaaccacaagggacccatccaggagcagccccaacttcatctgttattcctttgtttctagaagcacacttgttttcagcagatgatgagtcctgacttaggatttgggaaatgtggctactgcacctatagggaaagcctttccttgcccagatgaacccggccacttctaggactgtcactcccagttattgctattgatacttgctgaacgtctccattaagcacttctctctggggaattatattccccacatttctctctttctctctttttttgtatatgcaaaatgctcattgctactttatttaatataacaaaaaagcgggccagacacagagactcacgcctatagtcccagcattctgggaggctgaggtgggaggatcacttgagcccaggagtttaagaccggcctgggcaacatagtgagacccgcatctctacaaaaaaaaacgaaaacaaaaacaaagaaagaaagaaaaaaaaaagaaaaaaattagttgggtgtggtggtgcaaaactgtactctagctactaggaaggctaaggtgtgaggactgctggagcccaggaggtcaaggctgcagcaagcagtgattgcaccactgcactccagcctgggcaacagagggagaccctgtctccaaaataaacaaactgaaagcaacttaaatacctgtcaatagaggactaatttttaaaatttataaatgataatgcaaacataaatttttatttatttatttttgagatggggtcttggcctgtcgcccaggctggagtgcagtggctattcataggtgtgatcacagcgcactgcagccttgaactcctgggctcaaaccatcctcctgcctcagccttccaagtagatgaagctacaggcatgcaccacttttcctggctactgatgttttgttctttttatttttgttttattttttggagaagtatccatgatacatttggtgaaaaaggctttcattctttttgtttgtttgtttgtttgtttgtttgtctgtctgttttgagagtcttgcggtgtcacacattctggagtacagtggcatgatctcagctcaccacaacctccgcctcctgggttcaagcaattctcctgcctcagcctccctagtagctgggattacagatgcaagccacaatgcccagctaactttctgtatttttagtagagacgagtttttttttttgagacggagtctctctgctttgcccaggctgaagtgcagtggggccatctcggctcactgcaacctccgcctcctgggttcaagcaattctcttgcctcggcctcctgaatagctgagattacaggcatgtgccacaacgcccaactaatttttgtatttttagtagagatggggtttccccatgttggtcaggctggtcttgaactcttgacctcgtgatctgcctgcctcggcctcccaaagtgctgggattacaggcgtgagccactgcgcctggccttcattttttttttttttttttttgagacagagttttgctcttgttgcccaggctggagtgcaatggtgtgatcctgggttcaagtgattgtcctgcctcagcctcccgagtagctagaattacaggcacgtgccaccacgcctggctgattttgtatttttagtagagacggggtttctccatgttggttaagctggtctactactaaaaaatacaaaaattagctggacatggtggcgtgtgcctgtaatcccagctacttggggggctgaggcaggagaatggcttgaacctgggaggcagaggtggtagtgagccaagactgcaccactgccctccagcctaagcaacagagcaagactccatctcaatataaataaataaaaattaattcaaattaaataatatacagagtacctccaatgctccacagcaattgctcagttgcaccaattgtacagtgcagatcacataacatttctatcattactaaaagttawagggccaggtgtggtggttcatgcctgtaatcccaatgctttaggaggccaaggcaagaggattgcttgaggccacgagtgagaccaggctggacaacacagggagactctatctctaaaacatttttttaaaattagcctggagtggtggcatacacctgtggtcccagctactcagctggctgggaggctgaggcaggaggattgccagagccaaggctacagtgggctatgatcacgtcattgtacttcagcctaggagacagcgcaagactctgtctctaaagaaaaaaataagtaaataaaaataaataaacaaacaatgaaagtttttttttcttttttctgagacggagtctcgctttgtcgcccaggctggagtacaatggtgcgatcttggctcactgcaatctctgcccagctaatttttgtatttttagtagagacagggtttcaccatgttggccaggctggtctcgaactcctgacctcaagtgattcacccgcctcagcctcctgaagtgctgggattacaggcatgagccaccgcgcctggccaataatgaaagttctgtgggacagtgccacaataggccatccttttcttctgtgctttaacctaggaccctgaagcactgtggcaacactagccttgggattttctccttttgtgctatagggaccagacttagtgttagtctcagccttagcttggggtctgctctgacctccagattctttttgaccattttaagaggactggtctcccctccctgtctcctctccaggtgatccgccagctaatgaagaaggaattcaccctggagttctcccgagacagaaagtccatgtctgtctattgctccccagccaaatcttcccgggctgctgtgggcaacaagatgtttgtcaaggtcagaaatcggaatgtgcctcagccccctcttcttcctactcctagccacctgtcactgccctggaaggaaagtggtggtctctgaatgctgttctggtctcctagggtgcccctgagggcgtcatcgaccgctgtaactatgtgcgagttggcaccacccgggtgccactgacrgggccggtgaaggaaaagatcatggcggtgatcaaggagtggggcactggccgggacaccctgcgctgcttggccctggccacccgggacacccccccgaagcgagaggaaatggtcctggatgactctgccaggttcctggagtatgaggtaagcagctgggagcctcccactgtcgtggagctggtgaagggccgggtcccagccatccactcacagctccaccacccggatcatttcctacctcgtcagtcaagttgatggctccttagtacaggccatggaatcacaggacagtagagtttcagagaaccttgggaggccgggtgcagtgactcacacctgtaatctcagcactttgggaagctgagatgggaaaagcgcttgagcccaggagttcaagaccagcctgggcaatgaagtgagaaccccatctctattaaaaaaaaaattttttttaattacctggttaaattcataggggtctgggtaaaaagtaaaatacatttttaaaaatgttaaaagaaaagagatgaactggacatggtgacacacacctgtagacccagctactggggagcctgaggtgggaggatcacttgaacctaggagttggaggctgcagtgagccatgatcccaccactgcactccagcctgcatgacaagcaaggccctgtctctaaaaacaaaaaacaaaaacacacacacacacacacaaaagagagaaagaatgaaccttgggaatcatctagcaaatgtgatctgtggttggtaacaaggtgagccacttgaaccagaacaggagccaatgccactcagcacataggggagttcagctgttgtgttttctgtagcaagactgtctcgagacagttgatctgtgttctggcaaagactccttacttctactagaccagcgccagaatggcaccacagtccctcctttcattttgtacagaggatttcttctaagttgtgggtcacgtagtggcactgccaaaagcagaaagcagtacctcacttccagttcacgttctttctatgaaacacacattttggctgggcatggtggctcccatctgtaatcccagcattttgggaggccaaggcaggcagatcacaaggtcaggagtttgagaccagcctggccaatatggtgaaactccatctctactaaaaatacaaaaattagctgggcttggtggtgggcacctgtaatcccagctactctggaggctgaggcaggagaatcgcttgaacctgggaggcggaggttgcagtgagcagagatcgtgccactgcactccagcctgggcaacagagcgagactccatcccctgcgccccccccccccccgaaaaagacacaatttggggccacgtgtcagggctcacacctataatgccagcactttgggaggccaagcctggcagatcacttgaggttaggagtttgagaccaacctggccaacatggtaaaaccaagtctctactaaaataaaaaattagccaggcgtggtggtgcgcccttataatcccagctactcaggaggctgaggcggagaatcgcttcaacttgggaggtggaggttgcagtgagctgagatcatgccattgccactgcactccagcgtgggtgacagagcaagagtccatctcaaaaaacaaaacaaaaacaaaaaaaaaaaaaaaggaaagacacgatttgggctgggcgtggtagcttatgcctgtaatcgcagcacattgggaggccgaggctggaggatctgttgagcccaggagtttgagaccagcctgggcaacatagcaagatcctttctctactaaaaattaaaaaaaaaaaattagctggacatgttggtgcatgcctgtagtcccagctacttgggagggtgaggtaggaggatcgcttgagcctggtagattgaggctgcagtgagctatgatcgcaccgttgtaccactgcactccagcctgggtgacagagcaataccctgtctcaaaaaaaaaaagatacgatctgacccatgatgggcctggcaccatcagcacctgcaggtgcttaaatgaatgagatgtttcctgcctctgagcttccaaggccccactgaggtctgacaccaggccctgaggcttgggcaagcccagnnnnnnnnnnnnnnnnnnnnnnnnnnnnnnnnnnnnnnnnnnnnnnnnnnnnnnnnnnnnnnnnnnnnnnnnnnnnnnnnnnnnnnnnnnnnnnnnnnnnnnnnnnnnnnnnnnnnnnnnnnnnnnnnnnnnnnnnnnnnnnnnnnnnnnnnnnnnnnnnnnnnnnnnnnnnnnnnnnnnnnnnnnnnnnnnnnnnnnnnnnnnnnnnnnnnnnnnnnnnnnnnnnnnnnnnnnnnnnnnnnnnnnnnnnnnnnnnnnnnnnnnnnnnnnnnnnnnnnnnnnnnnnnnnnnnnnnnnnnnnnnnnnnnnnnnnnnnnnnnnnnnnnnnnnnnnnnnnnnnnnnnnnnnnnnnnnnnnnnnnnnnnnnnnnnnnnnnnnnnnnnnnnnnnnnnnnnnnnnnnnnnnnnnnnnnnnnnnnnnnnnnnnnnnnnnnnnnnnnnnnnnnnnnnnnnnnnnnnnnnnnnnnnnnnnnnnnnnnnnnnnnnnnnnnnnnnnnnnnnnnnnnnnnnnnnnnnnnnnnnnnnnnnnnnnnnnnnnnnnnnnnnnnnnnnnnnnnnnnnnnnnnnnnnnnnnnnnnnnnnnnnnnnnnnnnnnnnnnnnnnnnnnnnnnnnnnnnnnnnnnnnnnnnnnnnnnnnnnnnnnnnnnnnnnnnnnnnnnnnnnnnnnnnnnnnnnnnnnnnnnnnnnnnnnnnnnnnnnnnnnnnnnnnnnnnnnnnnnnnnnnnnnnnnnnnnnnnnnnnnnnnnnnnnnnnnnnnnnnnnnnnnnnnnnnnnnnnnnnnnnnnnnnnnnnnnnnnnnnnnnnnnnnnnnnnnnnnnnnnnnnnnnnnnnnnnnnnnnnnnnnnnnnnnnnnnnnnnnnnnnnnnnnnnnnnnnnnnnnnnnnnnnnnnnnnnnnnnnnnnnnnnnnnnnnnnnnnnnnnnnnnnnnnnnnnnnnnnnnnnnnnnnnnnnnnnnnnnnnnnnnnnnnnnnnnnnnnnnnnnnnnnnnnnnnnnnnnnnnnnnnnnnnnnnnnnnnnnnnnnnnnnnnnnnnnnnnnnnnnnnnnnnnnnnnnnnnnnnnnnnnnnnnnnnnnnnnnnnnnnnnnnnnnnnnnnnnnnnnnnnnnnnnnnnnnnnnnnnnnnnnnnnnnnnnnnnnnnnnnnnnnnnnnnnnnnnnnnnnnnnnnnnnnnnnnnnnnnnnnnnnnnnnnnnnnnnnnnnnnnnnnnnnnnnnnnnnnnnnnnnnnnnnnnnnnnnnnnnnnnnnnnnnnnnnnnnnnnnnnnnnnnnnnnnnnnnnnnnnnnnnnnnnnnnnnnnnnnnnnnnnnnnnnnnnnnnnnnnnnnnnnnnnnnnnnnnnnnnnnnnnnnnnnnnnnnnnnnnnnnnnnnnnnnnnnnnnnnnnnnnnnnnnnnnnnnnnnnnnnnnnnnnnnnnnnnnnnnnnnnnnnnnnnnnnnnnnnnnnnnnnnnnnnnnnnnnnnnnnnnnnnnnnnnnnnnnnnnnnnnnnnnnnnnnnnnnnnnnnnnnnnnnnnnnnnnnnnnnnnnnnnnnnnnnnnnnnnnnnnnnnnnnnnnnnnnnnnnnnnnnnnnnnnnnnnnnnnnnnnnnnnnnnnnnnnnnnnnnnnnnnnnnnnnnnnnnnnnnnnnnnnnnnnnnnnnnnnnnnnnnnnnnnnnnnnnnnnnnnnnnnnnnnnnnnnnnnnnnnnnnnnnnnnnnnnnnnnnnnnnnnnnnnnnnnnnnnnnnnnnnnnnnnnnnnnnnnnnnnnnnnnnnnnnnnnnnnnnnnnnnnnnnnnnnnnnnnnnnnnnnnnnnnnnnnnnnnnnnnnnnnnnnnnnnnnnnnnnnnnnnnnnnnnnnnnnnnnnnnnnnnnnnnnnnnnnnnnnnnnnnnnnnnnnnnnnnnnnnnnnnnnnnnnnnnnnnnnnnnnnnnnnnnnnnnnnnnnnnnnnnnnnnnnnnnnnnnnnnnnnnnnnnnnnnnnnnnnnnnnnnnnnnnnnnnnnnnnnnnnnnnnnnnnnnnnnnnnnnnnnnnnnnnnnnnnnnnnnnnnnnnnnnnnnnnnnnnnnnnnnnnnnnnnnnnnnnnnnnnnnnnnnnnnnnnnnnnnnnnnnnnnnnnnnnnnnnnnnnnnnnnnnnnnnnnnnnnnnnnnnnnnnnnnnnnnnnnnnnnnnnnnnnnnnnnnnnnnnnnnnnnnnnnnnnnnnnnnnnnnnnnnnnnnnnnnnnnnnnnnnnnnnnnnnnnnnnnnnnnnnnnnnnnnnnnnnnnnnnnnnnnnnnnnnnnnnnnnnnnnnnnnnnnnnnnnnnnnnnnnnnnnnnnnnnnnnnnnnnnnnnnnnnnnnnnnnnnnnnnnnnnnnnnnnnnnnnnnnnnnnnnnnnnnnnnnnnnnnnnnnnnnnnnnnnnnnnnnnnnnnnnnnnnnnnnnnnnnnnnnnnnnnnnnnnnnnnnnnnnnnnnnnnnnnnnnnnnnnnnnnnnnnnnnnnnnnnnnnnnnnnnnnnnnnnnnnnnnnnnnnnnnnnnnnnnnnnnnnnnnnnnnnnnnnnnnnnnnnnnnnnnnnnnnnnnnnnnnnnnnnnnnnnnnnnnnnnnnnnnnnnnnnnnnnnnnnnnnnnnnnnnnnnnnnnnnnnnnnnnnnnnnnnnnnnnnnnnnnnnnnnnnnnnnnnnnnnnnnnnnnnnnnnnnnnnnnnnnnnnnnnnnnnnnnnnnnnnnnnnnnnnnnnnnnnnnnnnnnnnnnnnnnnnnnnnnnnnnnnnnnnnnnnnnnnnnnnnnnnnnnnnnnnnnnnnnnnnnnnnnnnnnnnnnnnnnnnnnnnnnnnnnnnnnnnnnnnnnnnnnnnnnnnnnnnnnnnnnnnnnnnnnnnnnnnnnnnnnnnnnnnnnnnnnnnnnnnnnnnnnnnnnnnnnnnnnnnnnnnnnnnnnnnnnnnnnnnnnnnnnnnnnnnnnnnnnnnnnnnnnnnnnnnnnnnnnnnnnnnnnnnnnnnnnnnnnnnnnnnnnnnnnnnnnnnnnnnnnnnnnnnnnnnnnnnnnnnnnnnnnnnnnnnnnnnnnnnnnnnnnnnnnnnnnnnnnnnnnnnnnnnnnnnnnnnnnnnnnnnnnnnnnnnnnnnnnnnnnnnnnnnnnnnnnnnnnnnnnnnnnnnnnnnnnnnnnnnnnnnnnnnnnnnnnnnnnnnnnnnnnnnnnnnnnnnnnnnnnnnnnnnnnnnnnnnnnnnnnnnnnnnnnnnnnnnnnnnnnnnnnnnnnnnnnnnnnnnnnnnnnnnnnnnnnnnnnnnnnnnnnnnnnnnnnnnnnnnnnnnnnnnnnnnnnnnnnnnnnnnnnnnnnnnnnnnnnnnnnnnnnnnnnnnnnnnnnnnnnnnnnnnnnnnnnnnnnnnnnnnnnnnnnnnnnnnnnnnnnnnnnnnnnnnnnnnnnnnnnnnnnnnnnnnnnnnnnnnnnnnnnnnnnnnnnnnnnnnnnnnnnnnnnnnnnnnnnnnnnnnnnnnnnnnnnnnnnnnnnnnnnnnnnnnnnnnnnnnnnnnnnnnnnnnnnnnnnnnnnnnnnnnnnnnnnnnnnnnnnnnnnnnnnnnnnnnnnnnnnnnnnnnnnnnnnnnnnnnnnnnnnnnnnnnnnnnnnnnnnnnnnnnnnnnnnnnnnnnnnnnnnnnnnnnnnnnnnnnnnnnnnnnnnnnnnnnnnnnnnnnnnnnnnnnnnnnnnnnnnnnnnnnnnnnnnnnnnnnnnnnnnnnnnnnnnnnnnnnnnnnnnnnnnnnnnnnnnnnnnnnnnnnnnnnnnnnnnnnnnnnnnnnnnnnnnnnnnnnnnnnnnnnnnnnnnnnnnnnnnnnnnnnnnnnnnnnnnnnnnnnnnnnnnnnnnnnnnnnnnnnnnnnnnnnnnnnnnnnnnnnnnnnnnnnnnnnnnnnnnnnnnnnnnnnnnnnnnnnnnnnnnnnnnnnnnnnnnnnnnnnnnnnnnnnnnnnnnnnnnnnnnnnnnnnnnnnnnnnnnnnnnnnnnnnnnnnnnnnnnnnnnnnnnnnnnnnnnnnnnnnnnnnnnnnnnnnnnnnnnnnnnnnnnn

SEQ ID NO: 94231 - DNA, 113609 bp, Homo sapiens
tagagttattctatggatcttgtcataactctctcaaacccttccagaggcttcccacctcattcagcacaaatacctaagttcttaggaaaagctaaaaagtcctccaggctgtgacccactgtgacttctctgagctcatcttcaactcctcctttctctctctagccacaacgccttgctactgttcctagatgactctaggcacctttctgcttcagggccccctctgtctagaaggttgtttcctttgtatttccacagttcattcctcacttctgtcaagcctctgattaaacgaattcttttcaataagatcttccctggccactcggcatgacggaactcctgtagcactccctattccctttgccttgctttgtatttctccttaacatatcatattctgacataacacatatgtgttggttttcttcctccatggatcacaaactccatgaaggtagactgtttttgttcattgctgtattctcagcactgataacagtgctcgcacatatccattcaataaatatgtactgaatagatgaatgaaggattacaatggtcctatgaggatggtactattattttttcccactttcctaaagaggaaacagacaccaattgaggtactcaaggttgtatttctggtaactggcagaactgggatttgcgtggggcggggggaagcctgcctttgttgagttgtactatgtgcccagcattattctaagaactttatgtacattaacacttaatccctacacctccattttatagatgaggaaactaaatcagaaaggggtttacaatcttgcctggtatctgtgcacttgccagtaagttgggggcctgtgctctcagccactttgctacactaattctaaagccaattctttagagagatacaactttgcctcttaattgccaggagagtgagggaaaggaagaaatccaggattgctaccattattatgactgtggaccgccatagatggtagagtcaccaatcaagtcaaagaatgtaagatgagttggtttcattctcctctaactctagacttccacatccaactgcctcctgatatctttgcttggatattaagacacaaggtcagctgcagttaaagggatttagaataaccatggcagatcatagaagttagtagctgtcttacatcagagttgacctggtacacaggacctgcccaatgaagtcctcagggccccaacttgttgctctgcaatccctagaatgtttcccagtgtcttagtcttgtttatgctgctgtaacaaaatacctgaaactgggaaatttgtgaagaacagaaatatactttttcacagttctaaaggctgggaagtacaagctcaagacccccagcaggtttagtgtctggtgagggctgcagtttccaaggtgggaccttactgctatatcctctggagggggtgaatgctgtgtcctcgtgtggctaaagggatggaagggcaaaagaaggcctaagctagttccctccagtccttttacaaggtattaatccatccatgaggcagggccctcatgatttcatcagctgttagtatcatcacaatggggattaagtttcaacatgaattttgaaggggacaccatcattgaaaccacagcatctttcaacatggtttactaccccaactatttaatacatacattcatcagaaaaggacaaaagaaagggcaagtgacacccaatttcttttagaaaatgatctggaagttgcatacataatttctgctcacatcctactggccagaacttaagagatatggccacacttaagggtgtattataggcaaccatgtgtctggctagatgttctattatcatggataaagagcagaatgcataagagtcagctaggaagcagtttgtacaacagatatccaacaggtatctcaaatttaacattaccaaaactaaattcctgcttgttctcccaaaacctgctcctttgcactgttatcacatctcagtccatggtggaagacagaacaaactcaggggtttgatgttaatcatgttgagcttgaggtgcctgtagaacacccagtacaggtttccaataaggggttgaagatactgtgtctgatgcttctgactgagatctgtgttcaagattcagacttgattcctgactgaaataagtgatagaagagtatacgtaaatggtactgtcaaagattataacatggtaggcagagaaccaagaatggggagggaggaatctgcacaggagacctgagaaagagtggcctaagacaaggcagaagagcagagaatgtaaggtgacagaaccaagggagcagtttccaggaggcagtggtcagcagtgtggaaggctgcagagagatcagatgttatgaaaactgagaagcaacctttcaatttggccattatgccacagtgaaattgatacaagcaatgtatacagtaaaatggagggagctgctaaatttctgtagttgaagaggaatttggaaggtaatagcaatctaagtatagacagcttttctaaatagaagggacaaagtagagggagaatttatgaacaggagtgggaatatttaagggagtaagagtcttgagtcaatctctcttccctcaagaaataaaaattacctgtagaaaggacagaaggatggcttctaccttaagactcgaggtcagaaagaatgcaaatttagacaggtctgcaggcataagggtgggggtatgtaggagttcatgcctgatgtgtgcagtactaaacaatgatacatatactactactactaccactactaagcactaacatttactgagcacttatcatatgccagtgttcttcatggagctaagtttgcttaacagtatttcttaaataatgggagctattcatatattgaaagcttagtgtttttcagaagttgagtgtgtaacatttggatgtggcctaaaaatagcaaccgtgacttctatcccaccatatctgaattttgtctcttccatgctcttgacttatttctgatcctggggcatgctgagtagtaaaaaaagttgttcttgcattttgattcatctgttatgactggcatcaataagaaatcttcagcaataaaacagctctgtcaaaaaacaacttcaccagcaatttagggcaaaatgtttcctttaaaaaaaagtttgttggctgggcatggtggatcatgcctgtaatcccagcactttgggaggccgaggcgggcggatcacgaggtcaggagatcgagcccatcctggctaacacggtgaaaccccgtctctactaaaaatacaaaaaattagccaggcgtggtggcgggtgcctgtagtcccagctacttgggaggctgaggcaggagaatggcatgaacccgggaggtggagcttgcaatgagccaagattgcgccactgcactccagcatgggcgacggagcaagactctgtctcaaaaaaataataataataataaaataaaaagtttgttagtattagcagatacatattactaggtaccccccatgctcaatgaagtgttgggttactctgaaaaagtgtccaatcttacaggtgtgacttcctctggaactgcaagttcttgagggcagggatagagattgttcatcttttattgtttcccaaggtctggcacataaatagtagttcaagtagtccaacatatgacacataaatagttctgggtaaacattagctcaaagtttgctcaaggcattgatgcagatgcttataaaattaaattgctctttttactgtatacctgaaatgagaaaattattagaaactactgggtctcatttggactagaaaagtctgaagaaatcactgttcacttagtagatacaaagttgtttttctgggaaaaacacacctaaaaaaaaaaaaacacatgggtctgatatgggagaatttttttatttttcatataaacaggtgtatagggaagtggaacactgctagtatcttaaggattcctgaaagtatttatgttggtaagtttgatgagcaaacatttctaaatttgaaaatggataaaacaaaaagcacagtgaaatcttgaaagaattctaatactaatgtcacacataagaatacagatttaaaattaatgaactaaaacggatatacgtaatttctccaggaggaattaagatcctccttgatctcagtaaagcaatgaatagtcattctgacatctagctaaaagcagacttatttcccttcggtctttaatctttttggaactcagggatttccgccacactttgatacaccaggccattataaaattacacttaatttattgtcaatttctacttaaaaggaagaatacctctaagtatctccatatgctagatatagtagaaatggtatgctttaattagtccaacaataaagtccttaaagatttacattctttgttgcctattttgaaaacttgcgaagataaatttttttaaagattataattcttactagtcctttccatgaaatataacagcaaatagtttccaaatgtggatgtgtaatgagaggaaatgaaaagtgagtaaagagctgagttaaaacatcttaaaatcgaatatggcttaatactatcattatcatcagttgtcctggaataacttaaagtcttctagcttattgttggtttttcaatggttggttatagttgtgaggcggatacacacacacacccacacacttggctatacaaaaaagatgttccgagactgacagttaaaaattacactgctggccgagcactgtggctcatgcctgtagtcccaaaactttgggaggccgaggtgggaggatcacttgaggccaggagctcgagaccagcctgggcctaacatagccatttctaagtttaaaaataaaaataaatttaaaaaagatacactgctatgtacgactgttgatataaaaaatctgaatactagacatgggtactcatctagtacttcaagggcttatcaacaaagttgcaagttgtaacactatgaattgttagtgatactcttttggctttgctagcaagtgttgtaaagctatacacacacacacacacacacacacacatacacacacacaccttttaaaatggtgaccctggtaccaaatatgactttaaatggatttaattttaatggctttaactacgttcagctgtcatatggatcaaaattagcctctatccagctggggtcaaccagggagccacttttcttaaccgacgacctactgaacgtcaacaactgcaggagacgggactttaccttcgtctctggtaaactagttgacacatcctgtgttggcaagaggcctaagtagatgaccttggtcctctaaaatctggcctgcactctcggggcacccctgcaacatctacaaaggcagctccagatagaaaagggttggggtcgaaaagccaataacggcaggcacctgccccgcctcggggctggggggctattccagcggcttcagctaactttcagagccattcgtttcccaacaaagtctgaggcgttcctctgctgggtacaccaaggggctctgcaaccctcctgggggggggggtgcccagagggcttccggaagtcccaggtttattctttcgggtcacagacagcagaaactaaaaagagggattaccctttctgtccagtcgcaagatggcgaccgagcctggtgggactccgaggggccgcaggccacctcctcttcccaatggcccgtgcgccggcggcgacggcaagcgggagggaggcggggccggcgaaggaaggaggggcggagcgcggcgccctcccgcgcgtcttggccccgccccacgtccccgcgtcccggcctggagccctcgcccggccgggcggcgcgcgctgcctgccgggatactcggcccgcccagccagtcctcccgtcttgcgccgcggccgcgagatccgtgtgtctcccaagatggtggcgctgggctcggggtgactacaggagacgacggggccttttcccttcgccaggacccgacacaccaggcttcgctcgctcgcgcacccctccgccgcgtagccatccgccagcgcgggcgcccgccatccgccgcctacttacgcttcacctctgccgacccggcgcgctcggctgcgggcggcggcgcctccttcggctcctcctcggaatagctcgcggcctgtagcccctggcaggagggcccctcagccccccggtgtggacaggcagcggcggctggcgacgaacgccgggatttcggcggccccggcgctccctttcccggcctcgttttccggataaggaagcgcgggtcccgcatgagccccggcggtggcggcagcgaaagagaacgaggcggtggcgggcggaggcggcgggcgagggcgactacgaccagtgaggcggccgccgcagcccaggcgcgggggcgacgacaggtcagtgttgccgcggcctgcgccaggcggcgctggctcccctccgtcactcggccggccttcggggcccgctgtggcgaggtcgacaccccccttccccgccccccgccgccgaggcgagtgtttgggggcgcgtggtccgaaggggctggtgccagaagtaggcccctggtggccgcggctgctgcagccgtaactgtcagtcctggctgagcgacggcgggagggttttgtcgcccgaggggacgcgagcgggcccggggcggggcgggacgtgcgaggcgtcgagatttgggcctcctaggagccaggctcttcgagccagccggggccccagacagggaagggcaggccctttccttcaaaggggagccctttctcggcgttttcaaggtttttggctctcttggggaagacatatttagccgtgtgcttggtgggttggggttttgggggtggattgatgggaagggagggcggatgaagtggtatgtcaagcccaagggttgtgcgcacaggttactctgtgttaccggccaccaggatttctgaagttgaacgtgagttattggctttgccagagactgctgtgttatatgcagacctgtatgcaagcagttggccttttttccccccccttttcagtgtagaaaatgaaaaggatgctttcctcatcttggtggtaaaggcttttgttggtaaaggtagaattgaatgtaccaaatgccttagtccgtaaaattttagaaataattttaatacagacactggtgaagcttggcaaccttgaaagagaatttagcgtctacattttttaaatgactttttatggatatgctaaattagtaacagtccaaaatctgtttgagattattaagtggcgagggtgctgttgaaaatgtaaactaatagcatatggggtttacagtgcacagttaacctcaatcatgaagaaatgtggatatgacccgtaattttggatcattttactgcctgcaatattgagagaagcagcaaattattayagatttttttgggagacgacctaaagtttaagaaatacaactgttgaaagttacctgtcagagacacaaaggtacccaatcaatcttgttgaataaattggacaagtgggataaggtgtttgtctcacacttctgatcaataagtactcttacttaagaagtgatttggtaaatcatgtaaaatttagaatttaggagagataagaaagttgtaacttggtgtgtatagtggaaatagctttgaaattagatcctgtttttaaatccaagctacttaccacatttttagtgaaatgaatacattattaatgatgctactgataagccctaaggatgaccagaagcccttttaagaaacactaatacagttgaccaaaaaataaaaaaggaaatagcttcaagaaataattttcaatctttgtgtatttataatatacacaggagaaataaaagaacagaatatgaagaggtaacttataatctttacaaaattagaatgtaaactatgctagtcttactgtgtcaatatttattaacctgcattagtttgctaagtagtatgctcactatcctctggacattgcccctgtccctgaggagcttaactttatacagagatacaaaatactgtgttttgatttcctttcagaggatttataagctacttatgttttatctgtcctaaattctgcccttttttttcccatggctgaaaaaataacttcctaagaaaggtacatactagtcagaggtgtggggaaaacgtgttctcatcccacttgtgcagtccatttaacaggatttattgggtacctacagtgtctttgacatgtaacatttaatcagttgtatttcttaaactttagataatttctatttcgatcatttctatttcaatctcctccctctcccctccaaaaaaatttactgtgtaaactgtgataatacactgtttctctcagtgtcagtcagtggaatgatccagatttataggtcatagcaaaatttttcatcccaagctcttgaaatgatgtttccaaatgtccattttcttaaatgactgctagttatgttctccaatcatgttacacatattttgtttagacttataattgtgtaggtctaaatgtagaaacattacattatgtacatatgcagctgctgaaagaaaattagttttctaatttttagatcggggtgaagacaaacttttagaagtgatctttcggtaaaatactggatgaagtcttaggtgctctttttatgttggttcaggacaaaagttttttgactgctttttgagttttcccctcactgccaaatgtaaggataaaatgtagtaacaagacatcttggtatgtatagtggtaatatctttggaattagaccctaattttaattctggccttattaatcttggtaagccacagttttgtcatctgtaaaatgggttggtgaaacttccccagagttgtgaggcttaaagtatgtaaaacgcctaacacgtaggcactcaataagtattaccttagaaatcttcctatccagtttttctgaatggtctggaagcaccttgtatgtagtggactacagcatgttatcctttatgttgtttatttcttttctcattagctatgaactttttaaggccaggaattcctagtgtttaccagagaatgtgttactagatgtcttagtctgttctggctgctattacaaaacaccacagacagcatggcttataaacaacagaagtttatttctcacggttctgggggctgagaagtccaagatcaaggtaccaacaaatttgacatcttagtgagggccctcttcccttgttcatagatagctagctgtcttttcaccattacctcatgtagtagaagagtagacggggctctatagggcctcttttatagaggcattaattccattaatgatggcaaagcttcccaaaggccccacctcttaatactatcaccttggaggttaggctttcaacatgaattttgggggacacattcagaccacagcactagagcaggcrtgaattggttattggtaaatcagtaaatgatcaactaacatttattaggttcctcctgtggcttctatgagctgagctaagtacaggacccacaaagacaagaaagatgtctgtcttttttgaatgcttatagttgagtgactttctcacatttgtgtgtgtgtgtgtgtgtgtgtgtgtaaaaccctatcacataatggaacttcattttcccatgcccttccaatctaagagcagttctatggactcaatacctcctacccaccagctgctactgtaaagatttacttttttactccttttaaaaagttcaaccctctggcacatgcattacttcattccttggtcccagcccaccaccccagtatctggcacgtagtgtattagtatttgtgtgtgtgtgtgtgtgtgtgtgtstgtgtgtgtgtgtgtgtrtatatgtatatagaatttaaaatttttactccggcagttgtcttcaaatactctaattttggggggcatgattatcattctgtcttctggcagtacatggatagatgctacctgagtaggattgtctatgaggtcagctgctccagtcattttatacaagaggaaattggagtgcaaagctttaaaatgattttcttaaagtcacccaggtgtcagaaccagaaccagagtccatgtctctagttcaggactctgcacacattggcacatgttctgtcctaccttttgggatgaatagttatacttgctttgtgattactcacccacctttttggagacatatgagtgttttgtacactattaatagaaggcagccttcacaaaatgccatctgcagatctgttatttcttctaataaaggaaatgatgtaaaattaccttaaatagaaatartgttaattcttctggagacatattccataatccaaacacgaaatgtttgaaatacttgaagatgccatataaataagtcctttgtaaaaagataatattaaaaatttttgttttatagagatgggggtctcactgtgttgcccaggctggtcttgaactcctcagcttttactttagcttcccagtgtgttgggattacaggcatgagccacaatacctggccaagtccttttttttaatcaaatgacttattaatacacagtttctttgccagcttttgttttcatttgctatcaaaaatgttgcttagtagtgctttgatctgagttatcaataacaggtaaatgccattatggataataattcaaaaagaagcttattaattattaggcctatctgagagtgaagtaaagttagcattttctttttgtttattttacttattgtttatttgtttagagacagggtctcgctgtgttgcccaagttggagtgcagtggtgctgtcataactcattgcagtctcaggctggagtgatcctcccatctcaccctcctgagtaggtgggattagcatatgccaccatgcctggctaatttttttattttttmatttttttgtggagatggggtcttgccgtgttcaggttggtttcaaactcctggtctcaagcggcttggcctcccaaggtgctaggattacaggtgtgagctaccatgcccagctgagcatttttaaaaaatactggtctttgtacatgagtcgttactatttgattctaagccttatgactgatatccctaaaaattatttataaaattttaagtgcatcagagtcattgaaatggaatgagcactgtcttttggtcttgaggttgttttaactagcttcgtaatggtcatgagcaggttatttagcttttgaagccttcgttccttcttttgtcaaatgaaagtgatagttgctttgttttaaaagagtatgcttttcaaacgtgatcattcttgaaaatgtagattaagagctttttagaggccaagtgccatggctcacgcctgtcatcccagcactttgggaagccgaggcgggcggatcacragatcaggagatcgagaccatcctggccaacacggtgaaacctcatctctactaaaatacaaaaaaaaaattagccggacgtggtggcgcatgcctgtagtcccaactactcaggaggctgaggcaggggaaacgcttgaacacgggaggcggaggttgcagtgagccaagatcatgctactgcytggcgacagagtgagactgcctctcaaaaaaaaaaaaaaaaaaactttttagaaacgttgttttggggaatttttagtgtgtgaattcattttaaatatgtgaactccatttgacatggacaatggatcttaatagtttgtgatacattattcagtgtattaatcaaaagtcaaatctcttttgtaatttgctgtaccagacctgttgtgttaatctgatcaatggcaagtgaatcataagattgacctgaaaggaaaagatatttttaggggacatagaatcatattggrtaagattattcctatagttcattttcaggaaatctgaacaggaatctcgtgtaaggaatcacatgtgaattatagaagagagtctgatgtaagactttatttattaaggtctgcatctgtgtttcaagtaagagcatagaggtagtatatgagccctgaacactcatacaagtaggataaaatttttcttaaaactgttggctggacagtgtagagtctaatgctgtgactcttaacagttttgtgtgttccagaagttcatctcctcaggatcaattgaggttagtctagcacagactttagttatagaaaccaaacatgagaaaaattttttgacccatgtcttcgtagcatgcaggcttggtacctctttcctagttctggatgtgtgcccgttgtatatactttcagcaattcaggatgttccttttcatatttaagacaagcactcttgcatacaaattacatagctgtgggctgaatgaagatgctaccattgctgtacttctacacaggttcttttcatgtaatgaaatcagaagggatggcttttccatttcaagcttctgttaataagtagtcttagaattgcctttgtgtactgtagccaacaccccamctcatatatttttataatctttgtgatgcagaataaattctgaaactttccacctcctaattaaatatagaaatactgaaaacaataaagcaccatgtattcactatggacatatgtcacattttgtcactttcttgcactcttgtaatccctctctaaagctcatgttaaactcatgttctttattttcttctcagatgattcctttggcactgcatgtaacagtacaggaatttcttcctttcgtacttccaacaaatacttttttgtctcttaacagatgtgaaccataatgctgttctttagaaagcaaaggatgaagtgcacagcagtgttttctatataaagctaatgggtcataaggggaaatatgggttatttccagcttgttaattgtcttaatacatttttcctaagaattctattgtgcctctgtggttatatgcaccaatattgataatcttacagcgtgccataaataaggatttttatattatctttgctaaatattttaagtttttgttttgggaattgaaaaaatcttttgtgcatctatggtatgtgatacgtatactaatggataaatcctgtttcacacaaagattaattgggyaacatttttctttcctagttttctgaagtcagtggtcatgttgtgtgttggtgattgaaaatatgctgtttaggctgggcgccttggctcactcctgtaatcccagcactttgggaggccgaggcacacggatcacctgaggtcaggagttcgagaccagcctggccaacatggtgaaaccctgtctctactaaaaatacaaaaattagctaggcgtggtggcacacgtctgtaatcccagytacttgggaggctgagrcacgagaatcgcttgaacctgggaggcagaggttgcagtgagctgagatcacaccattgcactccagcctgggcaagcaagatttcatctcaaaaaagaaaagaaaagaaaagaaaatatgctgtttaagatcatccaaattcagtttctaagaagtgtaaagttttcctaattacttaagctgcttcattctcattcccttttgtaacacattttgccatctctgtaacatgttgaacatgtttaaagaacagagtgggagaataggaagttacgtggataaagtttggtaatcaaggtaggaatacatcctgcttcacagaatgggaatatttctgaaaagttgactgtagtattgaagaacacttaagtgtagtgtattagacgaactgagctaattttggtcttttatacacataaatcaagatttctgcatttcaaatcatgcatatttctttaaatttattgctcagtgtactgtatttcaaatattgtaaaaatgaaaagatcttgtggtcttatttaactcagtatgggataagtccttcccaccttcccattcttattccctcttttaggctgaatgaaaggctgggggagtgaatttaaaaatagatggatctcagctggagaatgggttggtcacgtatctcaactgatattaaataatttcttaaatcctggattgaagattataagaaaacagtaaatgtttgctctcagttcatttctttgttttgttttttcatgtacagttttaggcatttgtaactgctggatgcatgaactactttctagttctttcaggcctacttttagatatctgctgtggggacagtcctcaacacttaaagtaattttaaatagtgataggcagaactaggggtcagttttactgcctatgcctgtgctgaatttgacatggcattcctaggaggggaggtggaacgagggcggtgcacacattgtccatattgctagtcagtgccagattttgagaaattggggctaatctctctcttaaatggtcaagatctaattccccaaagtgctgtttcagataacctagtatttgtccaaaattgccctgctacaatagtatttatcttatatatatgtattatatatataatatatatataatcttatatatatgtattatatatataatatatatataatcttatatatatgtattatatatatataatacatataaatatatatatatatatatataggtttttttttgtttttcctcctgagatgtagtctcgccctgttgcccaggctggtgtgcaatggtgcagtcttagctcactgcagcctccgcctcctgggttcaagtgattctcctgcctcagcctcctgagtagcagggactacaggtgtgcactaccacgcccggctaatttttgtatttttagtagatacagggtttcaccatgttggccatgctggtttcaaactcctaacctcaggtgatctgcctgcctcaacctctgaaagcactgggattacaggcatgagccaccacaccaatcctattacattcttaaaaaaatgtttgtttgtttgtttttgtagagatgaagtttcactatattacccagcctggtcttgactcctgggctcaagtgatcctcctgccttggcgtcccaaagtgctgggattatagacatgagccactgcgtccagcctgtatcatatttttattctgatatcttttgtaattttktttttagtgaagtagggaggtttatattagataatcttccaaggtaattatcagcttggacattatatgctaatatgtcttttgtttgtttttaaaataagtgtatatgttttaattgtaaaatttttaaaacatccagaaaatgacatagcaagtgcctatttatccaccacctagaaatataaattatgtccatttttatcccttgggggaaaggatgcagttatataatcacttttaacaaccccaactgttcaagtcctgttacccgtctctacacaaagtaacaactgtcttgagattcttaagtaaatttcacatccttgttttatacttttactatacatgtgtacatgtatctgtaagtgatatgtggtgttggtttttgtattaaatttttacagayatgtataacgctgtctttcaatagcttgatttttttaaactcagtatcaagtttttgaggtgtatatgttgatgcgtgtacatgtagtttattcagtttcactgctgtatggcacttcattttatgcatagataaaatgtatgtgtcccactattgatggatattttgagttgttttctttttgctattataaataatgctgcagtgtttatttttacatgagtgtatgtgcaggtgttttgggaaaaaccgtagaagtgaaattgctggttactagatattggtaaattcttttcctaaatggatatgcccatgtatactttatcagcattatgtgggcatttctagcatcctcacccatacttgggattgtcagattttaaaatagttactaatttgaggcatgtgaaatgctatctcattttaatttacagttgcttgattattctgaatggtaggtaaaaggataggaaatttattattttctgtatgttttaaatatctcaaaaataaatgtttttaaaggaaaggcacaytatcgtacaacatttatgttgaaaaggaccatgaagatcatttcatccaaccttcttactttacagtgcagccaaagaaagttaccagaataagagtaaaatataaaatcctgcccattgtagtattctctggtagtatgagccttaatttttgatgtaaaaatcatgtctttttctttatgattgtgctttttgtttaagaaatcctctttttatattgtctgctaatagttgaggattttttgttactctttgttatttgcatttaggttcatctgaaaggagttaggattttttattttaaatatgaaaagctagttgttccagcattaagtattgaatttttaaaattttgtattgaggttaaatatacatacataatttaccatcttttttaagtgtacagttcatttttaatgattttttaagtrtacagttttttaagtgtacagttcagcaataataaatacagttatgttcttctgcctttgtcctctcactccccacttcggctgctagtaaccaccagtctatgcttatcttcttgagatatacttttttagcccatgtatgagtgagaacatgtggtatttgtctttctgtgtttggcttatttcacttaacataatggcttcttgttccatccgtgttcctgcaaattacagggttttattcttatttttatagctgagtagtattccactgtgtgtataaactacattttaaagtctattcgtcctaattattgaattctccccaccccacccaccttttttttttttttttttttccaggagacagggtctccctctcttccccaggctggagtgcagtgccatgatcatagctccctgcatccttgaaccccctggcctcaagcgatagtcttgcctcagcctcccaagtagctgggactgcaggcaggcacctccaggccctgctaagttttgtgggttttttttttttttttttttttttttgtagagatggggtcttcctatgttgcccactttggtttgttagttttagtagtttataattcctttgtattattgtgaacaaataacagttattttgaaatagaagagtgctttctatttaaaattttgctttgatagggttctgtctactttctgagccttaccttcctgtgcattcccctttggtcagtaccatcttaccacacaggctgcttttagtttcttgagttatccatcttccttctatcttatagggctcaacctaaatattactcagggaagccttccttgagagtctttctttttgcactcattggtttggggcttctttatattatactgttaattgaattctgagtcgtgtttatctcaactgagattaggtaatttattttgagaacagtaaatgtttatcatctgtcattctttttttcatgcccacattcagttatttgtaagtgctgaatgtataagtgttcatctacagataaggatcagttcttttttccccaactagaaatgttactccagttgataataacagctcaaacggaaatataaggcagaggtgagagagtcacttgaggccacgaattggagaccagcctgggcaacaaagtgagaccttatccctatgaaaaataaaattagcccagcttgggaggctgaggtggggggattgcttgaaccctggagttccaggctgcagtgagttgttatcacaccactgcactccagccgcggtgacagaccctgtcccttaaaaaaaaaaaaattataaccagccacattgaaatattttgtaagacattaatagaagactaaatgttctcatatgtttactgtttgtgttaagtacgtatggtttttagaacaacagttttytatcaagtgtggtctggttcacttagaattagatggggtagattttttgaaaagcgttttgaagttaaattagaagctaatggytttttgtcactaaatcaaattttgttttatgcgtttaagtgctacatttatttgataggcaggtgaatgtaacagattaaacttgaaaataatgtagctatgattccttcaaggaaaaacccacctacctttagttyttttagtatattgcattataagtcttttgtgtgtgcatatatagcaggcataaattggcataattctgggtttaattttaggctaggcgctatggaagtttgaactctaattacagtgtaaaaataacccagaggaaaatttcagaataataaatcattgggactatatggtacagatgtccctgttttcagattgtagaattgttgaccagtaggaatgctttatgattaaaagccaggaaattaaagtaattctgatgatttggtatttctaaagattttcatagatgacagttgagaactactctcagatgagattcttccattgctggtaagtcatstaataaaacacttaagtaaatattttaatgaggaatgataacattttaatattggcacattgtgagtctaccttctgtagttagtaggtaaataagaaataaacataccttatttaaaaaaaaatttcaaagaacccaagggaggggagagccaaggtgcacattagaaggagattacagwactcttccagtgcacagtggatgtgttgtgattccagagttctatgtatgtatgactgtgtagcccagatttaccagcatgggctcagttttaaatgttaggttaggctcataaatcatgaaaagttcctaggaattctaacatttttacatttccagaagagagcctcttgtattttgtggtagttgccccaccatccctcaaatattggtgtgtagaatctatttttgaggatgaggaaatacagaaaagaaaaataaaaagctatttttttttaagtataagaagaaatgaaaggtttctcttcgcttcatagccaattctaaaacttaacagttgttaagtgtgtttaactgtagagggaaaaaaatgcctggaaggaaattaccaatcaaatataaaatgtaagatagctgtaaaagtactgatatacatacagcttttttccttttggggaggcagtatttaaaaaaaatcctaccaaacatattctctaactttcaaaactgttaatagctttattgagataattcacatactataaaattcacccttttaaagtttttagtatattcacagttctgcagccatcaccactattgaattttagaacattttcatcatccccaaaataaatcctaacctgttagcagccattccccattctttcctggcctctggaaaccactaatctgctttgtctctatgaatttatttattctggatatttcatataaatgggaatcatacagtatgtgtccttttgtgtgtgggttcttttacttaccatggtattttcaaggtatgttcattgacatgtatgtctgttttttttgggtaacacacactcttgattactgtagctttgtagtaagtcttgaaaccaggaaatgtgagtattctaacttattctttttcaaaattgttttgggtctctgggtttctcaaatttccatagaattttagggttagcttgcaaaaaaatgcaactgggattttaataggacttggatttgtgttgaatctgtaggtctatttgggaagtattgctaccttaatactgtcttctcattcatgagcatgggatatctttccatttattaaggtgttctttaatttctttcatgttttgtagttttcagtatacaggtcttgtacttattactttaaaaatttatttctaagaattttatgttttgatggtattgcaaattgaattttttaaaatttcatttcaggtttttaattccttgtgcatagatttttgtgtactaaaacttgtgtttcatataatttttttttcctcttaactgtgttataggaatctttcaaatggttggctacatacacatccatctgattcacttagtaaacatttcttgaacacctactgtgtagtgggcctttttttctaggtcctggtagagacagcagtgtataaaacccactcagtcctttgctttcatggcacttaaatcctaaaaagagatcataaagataggtaaaatatatgttacatagtgctaaggagaagaaacaaataagggaagtgtttgcaggtgaaaaggatgatgggaaattttagatagggtaggtagagaaaacttcactgaaatggtaacttgggtgaagaactgagggagatgagagagctagccatgtggatatttgggggaagarcatttcaggcagagtgtagtgaatagggaaaccccaaagtgagagtgcctgatgtgtttgaagaactcgaggtgtggccagtgtagctttagaaaagtaattgatgggaaatagagagaatggagggtacagatattttgatcataataaggtgtttgatttttacctataagtgagatgggaagctattggaagtctttgagcagagtagtgaaaaagtatgacttatgtttagcaaggtcactctggttgctgtgttaatcatagactgaaaaaggggacaagggcagaaacagaccaattggtagaccattagtacagattaagacgtgactgaaatggacagagtggtcacagtgagggtggtgagaagtggttgaattcttgatatatgttgaaatagagtccataggatttggtagtagaccagatgaaagtgggaaataaagggaggagtaaaacatgatgccaaagttttttgaccagagcagctgagagaatggagttggataattcttataaattattgcattaaatctgtgcatcatatcacatgcccacttaactacaggtaattttaccatataagcttgtggggggaaaagaggaaaaacagaaaaaaggatggaaaagcatgttttaaaatataataaattaggccttaatgaaaaattgtccttgagaaacctgagatggaatactctaaatctgatgtgttctctcaatctttagaactgaactaggaattaactctgagagttcatgatgttatgagaccctttgcctgttttggaaattcggttgttttcaatatttgcttttgcaatgatggtacctgttattttttctgtaaggtagattcctacaaataagatgtcaggccattagatcatgtcaatctaaatatttgataggttttgccaattaccttttaaaaaataattttagcaagtttcattccttaaaatatattagggactgctcatttaccttgttttgattcatgtatatataaaatctgtttaagtctttataaataacctgggaaattgcctggttttttggtccatttctattgtggtgtttgttttttaaatttgtaagcattctttatatatcatttaattctttattataatttgcaaatattatctctacctacctttaattttatagtatctagtcatgtgaaattttaaagtttttatgtaggcaaatctgtccatcttttatggtttctgggtttcagcatgctaacaaagttgatataaatatgatctcatatatatattacaaaaactttttagagataggatctcactctgtcacccgggctggagcaaccatagctccctgcaacctcaaactcctgggctcaagtgatcctcctgcctcagcttcccaagtagctaagattatagacatgtgccactatagctagttggtttttttttggttggttggttttttttttttttttggtagagaacgtatctcagtgtgttgcccagactggtctcaaacttctggcctcaagctatcctcccacctcagcctcccaaagtgctgggattacaggcatgagctactatacctggccaatctcttgtattttcttctgatacttttgtgattttactttatagactttaatttagaaagttagatatgagcattcagcatatttttggatatggtatgatatggtttagatctggattgcatttgtcatggtttgggaattatatctaccttttattttcttccacttgggtagctgattgtcttgtaaggcatcctttccccactgataatgccacctttttctatattaagttctcacaaactttgaaaaaaatcaagtttattgatgtataattgatacacaatgaaatgcacccattttaactatatagttttattgattttgataaatatatacactatcactgctactacaatcaagctttagaacaattgaattacctccaaaaagttccttcctgtctgtagtcatttctccctcttggccccaggcaaccactgatctgtttattagttttcctactctagaattgcatatccatggaatcaagtaacatgtactcttccatgcctggtttctttcacttggcatgtttttgagattcatccaatttgtgtttgtcacagatttttgtttgtttcgtttttttaaatacaatatgactataccacagttcattcattttctggtgaacatttaaattgttttcagttttaggctgttgcgaataaaggtactgttttgtgtgcatgtttttgtgtgaacatatgttttcatttttctagggtaaataccttaaattggaattactgggtcacatggtaagtttatgtttaaatgtataaggaactgccaaactattttccagatgattatactactttacattcccatcatcagtgtatgagagttccagttctccaaatgtcagcatttgatgttctcagtctttaattgcacacgttctgagaggtgtgtagtggtatcccattgcagtgtttttttttaagtggtactaaaatacacaacatcaaatataccattttaactatttttaagtgtacagttcagtgacataaagtacattcacattattctgcagccatcaccactatccatctctgaaactttttcatcttctcagtctgaaaccctatccattaaacagtaactcttcattgcctactctccctatctgctggtaatcactgttctacttcatatgtgaatttgactcttccaggtacttcatataagtggaatcatacgatttttgtccttttgtgtctggcacatttcatttaataataataatgtccttgcgttaggccattcttgcgttgccttaaatgaatatctgagactgggtaatttaaaaagaaaagaagtttatttggcccctggtgctgcaggctgtacaagcatggcgccaccatctgctcagcttctggggagccctcatggtgagtttactcatggtggaaggcaaagggggagcaggcgtgtcatatggcgagagcaggagcaagagagagggtggggaagtggcacaccctttttaaacgaccacatctgcgaactcactctgtatcccaaggagagcaccaagctatgagggattgctcccatgacccagttacctcccaccaggccccacccccaacattggggattatattttaacatgagatttgggcaggacaaatattcaaaccgtatcagtcatcaaagttcattcatgttgtagcatgtatccaaatttgattctttaaggttgagtaatatttcattgtgtgcatatatcactttttgttttatttatttatttgtcagtggacatttggactctttgtaacttttaactatgtgaatgatgctgctatgaacattggtatataagtatctgtttgagtcccttcttttaattcttttggttatgtacttaggagtggaattgctgggtcatgtggtaattgtatgtttaatttttttagagactgccatactgttttccacagtgactgcaccattttacattcccaccagcagtgaataagggttccaatttctctgcatcttttctaacacttggtaatttctgttttttatttaaaataattgccattctaatgggtgtaaaaagtcattatggtcttaatttacattttcttcatgactgctgttgagaagttttcttttgtgtgtctgttcaaatattttcacattcttttcagaacatatgttctttgtcagatagataaatgtatttcttctgtatccttactgattttctgtccacttactaattaccgagagaggaatgttgaaatcttcaactataattttgagtttatcttccttctgctctgttcattttttcttcatatgctttgaagcaaagtctttaaagttgtgtccttaggtgtgttcacatttaggactgttagatctccttgattaattgatgtctttatcattatgaaatgtctctgtttatcgctggtaatgttccttatctaaagtctactttgatattagtgtatccattcctttcttatgattaatttttgcacattatatcattttgctgtgtttttattttcaacttattggtcatttaatgtctttcttttagatagcatatagttgcatcttgctttcagattgactttttacgatcgttgctttttgattaagtccatttacatttattgcagttggcaatataattgtgtttaagacactatttsttttctatttgtctaatcttttcttccttttctgccttcttttcggttaatggagcatttttggaattttgtattgtctccattattagcttgtccctctgttttttttccccccagtgatacttctaggatttacaatatgcacctttaacttacctcaatctaccttcaaaaatattattcctcttaatgtataatgtaagaattttggaatagtatacatccatttactctccctcattctttttggtattatgatcttaacattttacttctatatgtgttatagattccacagcagcgtttgaaactatttctttcaaaggccagttgtcttacgaagaaacttaaaaactaagaataacattcctttatatttaccttcatatttaccatttttatttatttttctttgtggagattcctttttgtagatccaagtttgttgctggtgttattttccttttacttgaaaaaatttcttaaacatttctaaagtataggtctactggctacaaaatctttcagcttttgtttgtatggaaatgtctttatttcactcttcattttatcgtacaatttttcaaaccacacagactttaaaataattgtagaatataatttcacaacattttgttctatttgttattgtcttctatcttgtccatctatccatyctgtcttcttctagtgtctttttttatgcttttcaaagtaagttgcagttgttagtataccacacccttaacttgagcatgtatgttaactaaaacttagtagtttagtatttttaactagaatttactatgctgttccagttatttattgctgtgtaatacattgccccaaacttagtgccttaaatatcagcaactatttattttgctcatgaatctctcatttggtcagggattggcaaggagagcttgtctttgacaatacattgtaacaactgtttacatagcattacattgtatttggtattataagtaatctagagatggtttaacatatttgaagatgcatgtaggttatatgcaaataccatgccattttatataagggattcgaagcatccttggattttgggatccatgggagtcctggaaccagtcctctgtagatagttgaggtatgactgtagtctttggattgaaagactcactaatttcactcagattcaaggagaagggccatagactccaccacctgatgaaaaaatgacagtgttacattgttaagagcatgtggaatggcttctattgtgaccatctttggaaaatacagttgaccacatataccatttcatgagctgtgacaaatgtatacacctttgccagaaagttctatcagggtatagaacctacacctcttcctagttattccttccccccacaccacccctagaacctaacattgttcagattgttttcatcttagtttagcttgcgcagaactttatgtaagtagagtcatacaatacttatatgttgtaaaaagtttctttttgctcaacataatgtttttgagattcatccatattgttgaatgtttctgtggtttgtgacttcatctgttaagggacacctgggctgttttcagttccaggctgttttcagttcccagctattataaaaaggtacaatgaacatttgtgtaaaaaaagaagtctctgtgtggacatatatgtttcttttttcttggttagttgatgtgtttttctttcagcatttgtttttgatgagaagtctggttatacagtcatgtgccgcatgctgacatttcagtcaacgagatcatagttgacaatagtcatttaagattataccaccatattttcactgtaccttttctaggtttagatgtataaatacttacactttgttacagttgcttacagtattcattcagtatagtaacatgctgtacagctttataacctaggagcacccgggctataccatgtatcctagttctgtagtaagctataccatctaatctagatttgtgtaagtacgttctatgatatttgcacaatgattaccatgctgagagttgttggggttttgttttttttttctttttgaatctgtacatttatggtwttccttaaatttggaagattgttgccattgtttcttctatatatatattttttaccacctttactcctctttcatcatttcctctttttctgggactccagttacacatatgttagactgtttggtattatccacaggtcattaacatcatattcattatttttcagtctttttatttccctgtgcttcagtttgctttgtcttctattttactgttttttctcctcccttgttaaataatttcagatatttcgctttatatttcaagaaattccatttgattcattttattcatgtatttttttgaattcttgagcatatttgtaatagctgtttgaaaatcaggttacttattgatttcttgaattttttcactctgaatttgttggttggttttttctcttggtcatgggttgtattttcctagtatttattttattttattttttgttttttacatatttaatgattttttaagattggatgctggacattgtaatattttgttgttgggtgtctagattttgttttcttttagagtgttttgttttgtagccacctaaataacttgctggtcagttttatcccttcagggctacattggagtttgtctagagaaggctttgctttaatggtagtagctcctacctaaggcatgatccttctgagtctttactaaatgctcccagtgtcaccgtgttctcttcactcaggttagagagaattttaggagtctcccagtcctttataagtactgggaatatttcagcttactgcccctctttcactagcttcatggagtcacttaccttaatcgtgtacagttagtactcagcagtggactctcaaatggcagatttctgaagccatttctctgccttctcagacaagcacttgtctggcacttgtcatcaattttacccacttcagctttctcagctctgatctcttgattctgaactcagtaaaactgctgtcttctcactggatttcccctccattgactgcaggttggaaattacctccaggcagacatccaagcagtggatggctcacctcctttgtttttgtcctttcatgcattatagtcctctgctgcctgttatccaaggtctgaaaattctcgtttgagaaggagcaactgtcagatactttcggatctttctctgaaattagctttctgttgtgcttgttgtgcttacctctttgtctaatgctaataccatatgaggtttttttttttttttttagaatgttttaagctatacacttctaagtgtatagcttgttgcactttcacacactgagcacccgtttagctagcattcagatcaaaaaacagcagcagctcctgcgtagccccttgtgctctgtgtcactaccccttttcttccatgtgtaaccactgtcctgacttctcatagcatagattagatttgcctgttttcatcctttaactagaatcaagcacatttagttgtgtctgacttcttttaatgtatttgtgagatttattcacattgttggttgtagtaattgtttatgatagtcgctgtatattccattttaagaatggaagtgatwttccattttaagaatatgccatagtttaatctgctgttacggacatttaatcatttttggtttggaactgttaagaatattgctgctgctctaaacatttcagtgattgtcttcttgtgaatatgtttacttctgtttggtatacttaagagtgaaatttttaagtcataaggtatgcatatatttagtgtatactcagttttttaaaggcgtgccgattttaattattccatttaagttaatatgttttaatatctggtagagaaaggaacattattagaaacaattgttttggttattcttacatatttagtctttgaaaaaacgtttcttaaattggcatttacttatatttgtgttaatttgggaagaaatggtatctttgttcatctatgagtcacatttggaactagctcaaaggccatgggtcctgattcctttttttttttttttttttttcttgtagaggggaggtatggtgtcaagaaaacatagtcaccattattacgaaaagtaaaatatggaagagatgatccctaccatcaatcagcttacaactagaggcactgacaaatgtatacagatagctgtaatgtaaggtataacataataaatataaggagaaattaataaattattttatggtattaagaatgtataataagacatgaaggagatggtgattatgtataagagtttagataaccctgtgagatacagtgtttagaatgaggccagtttttaacatggcatgataggtgggtgggggatagaggttagtaatggatagaggaccatttccgagtgaagtctcctcagaagcaaaagcattgaagtcagaaacacaaatatccagtacattatagccaatagtcaaatgatgggactagatctggtaactggtgatgatgtcatatagtgggcagtagtgctgggatggctggggtcagggccacatggcaggggcctcaaataaaatgtgaaggagttagaaatttattctgttggcatgagaaagtgttaaagcttttgaatatagaatgatatgtgtaactttgagtttttaggaagataattctagtggcaaagttgaggataaaggcaaaagggaaaccagatgaaataatggggcactgtagtaggacagtgttggtaagtttgaggaaaaaaggagtaagagatatttttaaggaaattcatagggtttgagtataaattagaaggcaagtacaagggaataagcgtggtctttagaatcagacaaattagggtttgaatcttaaccttgcatttactaaaggactgaaagctagttccctaagagaaaaattttctcttttgtaagatgcttattctataaacatttgcaagcactggaagtataaaagcaaatgatacacatgttctcttgaagtctggtctagtctgtaagaagaggctgcactggcaggttttgaccaaattgtgtagaatctcatctgacgtgattgggagctttggctttattctggaagcaactaaaagcaatcaaaaaagactggggaataatgtgagaatgtagaaatgtaggggaatttctaaggatgaattggtagcaattggtaaacaatttgatatactgggaaagagagagactctttagaatatgactgagaatcttccaatttgagcagctggactgatagtgctaccatcattacctcacagggtttttcttagtgtgtcttgtaaatcttgcttgtccctcataaagaatggttttccttttcttcagactaaggactttttattacagtacacaacttaacaccccctgtatctctccatcacaacacttaactgtgcattgttattgcataattaattgtggtttttatttgtgcccatttccttcaccacatgagggcaagaaattatgtctagtttttctacctctgcatcttcatccacctagtaggcactcaaaatctagtagacagtttttgaattaatgattatgaagaatttgaaggctgaacaagtatcaacctacacagtggttagggcaaataaaaatgagggggagaaagtaatgaatggcaccaatttttttagtccttaaccaggacagtgagatkaggcagagtgagttctttgggaaaataattgagtttgatattagatacgttgaatgtagatgttaatgagacatccaaatggatgtgtaccgttggtaatatgtagttgcaggcataccatgccagacataaggacttaaagatacagagttaggggtttgtaagcatagaggtgctatgggaatggatgacattgygcagaaaattggtttaggttaagaaaagtggctattgacagaaacttggagagaggccatgtatgaggtaggaagatgaactagcagaagaccttattgcctttagagagatggaagaaaatgagtggatacaacattagggaagccagaggaggtgaggagtcattagcagtcttaaaagctacaaaaattaagtaggattaaggggccaaagcactgggaatatacagaaatgatggaaactttacaagaaaaatttcagtagatagaaaaatagcagctgagctagtggttttcacgtctttttggcagtaaaaggaaagaagataaagaaatggtactctgaggagctaatggagttgagggaattatgttgcaagtattatttgaaagcagtatttaaaactttttaagtcttaactgcagaatggactggaataaggagaaactaaagcaggaggacttaggaaaattgttgtagtagtcctttaattgtgaaatgtgtaaacggacaaaacttagacagttttaataagtagcattatccataaatataagacaccataaacatgatgcaaaggagaacagaagtgttgggtgttataataaaaagtgatagaaaaaaacagtttgtgaaattaagttttgaaacagctttagaaggaggtgaaggaaaaatagaaatgaataaaatgaaaattttagggaggtagatatagatcaacataggcatttattattagactatacttatttataagattattagactgagccctctgttgaagagataaagtaagagaactatgtctggtattaggattcttatggttaaattggcaagtgagtgtgcctaatatttgtagtgcttacagtttttgttattctgtatttttatagatttggtatatttcctccatgattatgtgttcctaactcataatttggaaggcagggcttcttaaaatgagatctgtgtgtcatgtgaagtatatgttaaaatgcaaattcatttctgcgttcttgggttggtctgaaaaaaattaaaaaaaaaattcatttacccctacttcatgcactgaatgaaaatctttgcgagtagagcccaagtagttgcatttttagatttccccaggtaattctattatagactgaagtttgaaagtcagtctctaaaaccttaaaagttggttaattttatttcaaaatgttttatatgcagtgtattcactttctaccatcaacctctaggacactggataggtttcttaacctttgagatttgctttctttatatgtaatgcagtacatgaaaggactttatttttgttccattgaggaatgttctgattgtatacaaacaagttaagaatttacagtgataatttaggggcttgctttaagcttcaggatttttttttaagagttaagttttgatatatattaagtggttgatttaataaattataattatcgtcgtatattgaagtcctgttttgtgccaggtaggcattatactataactttttaacgcattttctctgctacaataacctgacattggagactcaagggtcagagggtcggcccaaggctgctactctagaaagtggtagatgcccagatttgtacctaacatagccgatgcttagcatatagaatttaattaaaaacaaaattgctataggtatttgaaaggattagagggatatagtcaaatagttttcatatgtgtttagcccttttggagggaggatagagtaaataaatagaaggcactaagctttatggatgaatatgggaaatatggctttgcctgctgaaagcactcaggccacagggcctgcctacctatgctttcctcatcccggcaacagcagtaatttgtttcttgatacgtttttggatgttcataattatagaaaataaatttgcctttatgatgaaatttagtacctttttttttgaaagttcatccagttgtttatgtaaaaagaattgagtgaggtgttttatattttaggttaaaaatctgtaagagcctgattttagaattcaccagctcctcagaagtttggcgaaatatggtatgtttttgttttattttttggaattcgtattgcatgtgtatcttaatgtcataataatgacagatgtgttcagcaaatttgggcccctgccatttttaaagcattgtgtcaggtgctcactaactacacttccaagactgtatgagggacccaggtagggtgctgaaaaaatttacaagagattagtgtgctatgagaggtaaaataatatgcataaaaagattgagagggcaggtttggattttgggctatgagtattaataatagctttcatttgttgttgttgttgctgctgctgctgctgctgttgtttttgagacagagtcttgctctgttgcccaggctggagtgcagtggcaccttcttgactcactgcaacgtccatctcccaggttcaagtgattctcatgccttggcctcccaggtagctgggattacaggcgtgtgccaccacacctggctaagttttgtatttttagtagagacggggtttcaccgtgttggccaggctagtctcgaactcctggcctcaagtgatccacccrccttggcctcccaaagtgctgggattacaggcgttagccaccrcgcccagccatttgtgagcacattatgtcaggcactgttctgagatacttagatgttagcttgtttatccatgacagctctatggaataggtactattatcctagttctacctataaggaaactgagactcggagaggttaagtaacttgcccaagatttctcagctagtgaatgaccaaacagrgacataagtccagcctggccttggagccttttgagcaccggatctcataaaagaggggactggaagagaggacttgactctagttttcaaaatacatatagctctttaattacattgaggtcaattagtcaattaaaagatattttaactttattatttttgtgtttacaagatggaaagttagacttgtttgaatcttctaattccacataccattagtctcttgagaacccaaggggaagctgtatcatgaccacattgtttattttagggaaggtggtgtttcccatatgacctcagcaatgtctaagttcttattaggcaatgtatagttaggataggagtatctgggagattgcgttatttcttacagatactataaatcccatttattggaatcccctgcaattatttttatatattcaggccaatcctcacctaatctggattttgaagccctgcgttcatagctgcataggtatgggctcaaacattcatgttttaaccgttggtattcgcagataccttgctgttttatattgggttctgaatccacactggtaaccaccttttacgcttgactattgttgctttgaggatgttaattatgaaaggtttcttcctcctaatttcctcatctttccgtagttgatgcctcagatttggcctggataggggaatcgtgaggggaaagaactagttgcacaaaatgatcttttgatactgggatatttcagatgtatggtatctttgccagaactacagtgtcagtaaagaggcctgctaaatttgaactgtgacaatcagaaaagttcagctaaggccatgtaaggggttaaaaagatatttggttgagggaggaggatatgctttcatcttttgccatactttttcatgaaattaaatcttagtagatttatggccaagaaagagtagaatatatttttatgcagtacttaaggggttttgactgatgttttttattattattatactttaagttttagggtacatgtgcacaatgtgcaggttagttacatatgtatacatgtgccatgctggtgtgctgcacccattaactcgtcatttagcattaggtatatttcctaatgctatccctccccttccccccaccccacaacagtccccagagtgtgatgttccccttcctgtgtccatgtgttctcattgttcagttcccacctgtgagtgagaacatgcggtgactgatgttaaatgactttacgtacatacagaattagtgggactagactttgtgtttatgtgtgtgtgtttatgtgtatgtatataactattccattaagcagttgccctccttggtgactgattgctctatcagcttaggaatcttttgactgaatttgtccgtatttgaaagatctcaatctgtgttctgaatctttactcatttacatatacttaaatcttgaaacccagtatagcaaaactaagccaaaacaaacaaaaaaatccatcccttgataggaagtcagtatatctgggttttartcagtccttcaacactagttccaaaatcttgggcaagtcagttaatcactcggaggctgcttaattttttttttttttaattcttagtatattatctgtcttgattaggtaaagccaaagttgttataagactcaaggtactattgaccaaaatgcttcagaaactataacattacataaaagtacaaggaattattacattttctcaaatgaagagatcatttaagaaaaacaaaatgctggaaaatagtccttaaaaacttttctataataattactcttctgatgaattttacattgacacctaatttgaagctttgaatattattttttgaacaatgaattgggtttatatattaaagtgttmtaaccaaaggtttgtttaatttattagagttattaagcctacgctcagatcaaggtagcagctagactggtgtgacaacctgtttttaatcagtgactcaaagctgtgatcaccctgatgtcaccgaatggccacagcttgtaaaaggtaattttgaattattttacagcctttaaaaggctgtcattgtaaagtgaaatacatactgtaaaaatgaagacaatgtatagttggcaggaatactgctaagaatagtgggcctgagagttgacctacttcatttaatctccttaaaatattttagtgtctttttttctcattaaaaatatcagtagccactatcaaagacctatctgtatgtataaacaggaaagtatttctcaaaaaaacttcaaggytttaaacattttactataaacattatagaaaacattaaaaatttcttaatatgcattttaaagtatgccttttatgtggtgaacgttttaactaaacatttctctagaagtttttataacattaataaaactagtatacttttctctcctagagagttacagtggaggtaaaaggagtggcttgcaggatggagaagctgcaccagtgttattggaagtgagccaccatttgaatttgctagctcatgctgcagtattcagattagtgggtgttttgtgatcatattttctgcgattcaaatcaagacctaaaattgattctcattctgagatttacattttattatccaatgttatttggttattgtttcagttttaaaatttctgacttgttattctgacacactttaggataacctaagtcaatagtttaatacaaaaatttccctttggttatatgttttgaattaggttatatgttctgcatttacaagcacatacaggattcttacttccagcaacttggcagtaaaagaataagtagactctttaggagccaaagtcaagcttgggaactgttgctaggtggtatatatttcatagtttatgtttgtttccaagacaaggtctcactccatcgcccaggctggagtgcagtggcacgatcacagttcactgcaactttgaccttctgggctcaagtgaccctcccacctcagcctcccaagttgctgggactaaaggcacccaccaccacacccggctaagagacgaggtttcatcatgttgcccaggttgaccttgaactcctgagctcaagtggtccttatgtcttgacctcccaaagtgctgagattacagacatgaactaccacacctggcatatgtcatagttttgagagtttgaattctaacctcgggacttttggtaacttatttataatattctagaaatatactgttattaggatgagtagaaattcattcagacagaaaytattataaattactgcaagaaaaatgtctgctagttctgcatatattcatttttctcttgattaaaaaacaatttccaatttgagtagaacaactttgctatgtttaatagacccaggacagatttattttaaggtaataatctttcaatccttcttcttctrtactggattggtttaaattacttagcttgtcttatcaatggtttttaatagcctactttaatatatgtaaaaagtagtaattaatatgttacagtttggtggcaaacattttgatgccaaagttcacatattctcttgcttagggaacagaaattgggaagatagatgtagttatcatttgataatgtatttaaactctatcccatttcaggatctcaaaactttgtaacagttacatattgtacttctaagacttagatttgtttttcttcttgtgtcttacctttttgcagtaatatttttattttcctatcatcatgtcctcattttttccctctcttctctttccctgttaattttgaaagttttgctgcctacgtgtttgaaaacttctaatctgcctctcttccctcagtgccagcaggtttattttttgttttgcaagccagctctgcctccttacagtatgacatctgatgctggagggtcgcactttcamaaatgagtcagctggtacatggggttatcatcaatttttagctcttctgtctgggagatacaagtttggaagcaatcttggggtacttacccacaaggctggtggagaccaggtgtgtcacataggtgatttkcttgctccctgggggagagggtggagtgaaatttttgcatttgtgtcacagccaagtcactgccacctccagcatgccccagtttttagttcttatgtaattttgtgcaaaattgaaaatttaaatacattgcaaagaagatctaaaataaatatttgagctgctggagtctttttttttttttttttttccttttccattcttgtccttggaatctgaatgaattgcagtgagggtaattttgagagtctgataaagaagtgaggggttgttttttgtttttgtttttgtttttagctaagaaatttaraaaacaggtttgtgtgtgtgcgtgtgtgtgtgtgtgtgtgtgtgactgattttaagattcttgttagagttgcttaaagttggaagcctaaagtcagtgagaagttcacaaatcaggactttgtaatgccaatttgaaaatttarcttttgacctcaaaaaacattttttatctagtttgggaatttctaagtgttagaaatcaatattatattgactcattcattgttgctgatgctgtttataaaagtgaatagatagggaaatactgattcatatctcgtgaaatgaaaatgaaaggctttttagtgacttagaattttaaatatttctacataagagagcagtagtatatttagaaataacaaagtaactggcaactgtttaaaactgaagttaattcacagctatccagtgcaaaacttcacctcaggtgatacacttttgacaggtaatacatacagtaagtgtatttttagggaaacagtttcattgttgaaccaagataatcatcattagaatgttgtatctgatttaagtgtctttaaacttaccaaggtattagattttagtttgaattgtctggagtagcggtagcggttggcacatttgttcttaaagggccagaaaataaatattttaggctttatgggccatgtggtttctgccacaagtcctcagctctgttcttttagtgtgaaagcagccatagatgatacctaaatgaatgagtatggctgcatcccaataaaacttcatttacaaaactacatggctggcctaagctttagtctgtctgcctagggagtagtttactgagccactaatctaaagtttaatactgtgagtgaataccagtgagtacctttgttaatgtggataaccaatacttggctataggaagttttttagttgtgtgttttattacacgtatttgactttgtgaataattatggcttataatggcttgtctgttggtatctatgtatagcgtttacagtttcctttaaaaaacatgcattgagttttttaatagtccaacccttaaaataaatgtgttgtatggccacctgatctgaccactttctttcatgttgacatctttaattttaaaactgttttatttagtgcttaaatcttgtttacaaaattgtcttcctragtaatatgtctacctttttttttggaatatggaatattttgctaactgtttctcaattgcattttacagatcaggagaacctcagtctgacgacattgaagctagccgaatgtaagtgtaacttggttgagactgtggttcttattttgagttgccctagactgctttaaattacgtcacattatttggaaataatttctggttaaaagaaaggaatcatttagcagtaaatgggagataggaacatacctactttttttcctatcagataactctaaacctcggtaacagtttactaggtttctactactagatagataaatgcacacgcctaaattcttagtctttttgcttccctggtagcagttgtagggaaatagggaggttgaggaaagagtttaacagtctcaacgcctaccatatttaaggcatcaagtactatgttatagatacagagatgcgtaataattagttttcaccctacagaaatttatattatactcaagagtgaaagatgcagaagcaaataatttcagtcactgaggtagaatggtatccaaaatacaatagtaacatgaaggagtactggagtacccaggtatgcaataggaatctagtgtagatggcagggaagtaagagtggccaggaaatgctaagttcagtcttgaaatgtgactgggaatcaggcagctagaagcatgagcggcttattccaggcagaagtatgagccaaagttagaagcagcatagggagtaggggacaataggcagttgaggacttttagatcataaactagctgagaggtaggaaaatgaagaagataagatgtgatagaaggtattagggagtcagcaaagaatttgctcagtaggtagatagtaagtttgtcaaacgtgtatttttaataaccttgcaagagagaaaggattgaagagaaacgtgtggtggtaaggtagttcagtcagtgagagccttgacaatgacagtggtataataggaattcaaaataaatttttctggatttaagacaaatatttaggacatgaagtaagtaagactttagtgatttattgtgaagactaaagatgtttcagataatagaggtagtaattatcaaagcaaagtttttcgaggtattaagggttggaatgaaaaatacaggtgtatctctcatacaggtaatataaaaaaagaaaaatgcagatatagtgattgaccttgaataagaggaaagatgcccatctaatgaaattagaacaaggaagtaaagatggatgtgtgatattaattgtaattgtgggtgagggtggaaaaatcaagatttttttactgaaaatattggaaccttatttaaatgccggtatatattgtgaatctgcaagaaacgactataaaatgtatttctcaaatttatgtgacccaaccatgtgacttgtcttttaagctttaaaaaattktrgtaaaatacacataatgtaaaattttccatttcaccatttttaagtatttggctcaatggtattaagtatattaatattgttgcacagtcacgatcagaactctctgttttgcagaactgaaactctgtacccattaaacaataattcctcatttccttatcttcacagcctctgacaaccattattctactttgtgtctaattttgactgctctaagtaccccctataagtgcaatcatacagtttttgcccttttatgattggcttattttacttcgcagtgtcatcaagtttcatccatctttagcatgtttcaaaatttgcatcctttttcaggctgaataatgttttattgtatgtatataccacattttgcttatccatttacctgttgatgagcgctcaggttgcttccatgttgtagctattacagataatgttgctatgaacaggaatgtacaaatatctttttgagaccctgctttgaattgttttcccagaagtggaattgttggatcatatggtaattttatttttaaaattttgagaaactgccatactcttccagagcaactgtacctatttgcatttctaccactagtgcacaaggggtccagtttctctacatccttgccatcacatattgtgtgagagtgtgtgtgtgtgtgtacttcaatagtagtcattgtagtggatataaggtagtatgttactgtaggttagtgaccacgaaactttttatgaaacattttttaataatattttgtggaatacaaggtttgtttagaggttttgagaagactgaaaacttaggaagctactgaggggaatgggtgaagaagtggatcagaagttgagagtcttgactggctggctacctgaaatcagaaaccgtatcagagtaggagaatctcattccactgagtgactagttaagattaaagactttatcacatttgaaatttaaagacttttctccaatagccagaagattatgcatggtattttagggttggatattagcagagctgatggaacagaatcattagtggcatgtgcataagatgttaacattggagtatttgaatttatatgctgtggatgatggccatgattggaaaggttgggatgccagaccaaagtgttgagttgttttaagaaaagcctgaggtctagataacagcaagatggcagactagcactttgcagcactcatctcattgtagaaccatcaatttgaacaactgtctacacacaaaaatataagagctaagaaaccagacgagagattacctgaatgtggcacacagataagaaaagacacattgaaaagggtaagaaggacagttttacattacttgtgtcacacctccctcagtccctgagatcccagcatggagagagagactgttcacctgggggaaggaggggaagtgtacaccagacttagaccctaacattgagctcgccccagtaaaactcaatgctaggcaggcccccatggccccaaacttcaggccaatacccacaaaccaagcttggagrcccaccccagcaccaagctggatcccacagccctaggctctaagcctgtctagtgctagggtggtccctgcagccctgccctctagatcggcccctgtggcctcacatcactgcagaacaagggtccaaacccagtacttggccagccccttgtgatccaaattctaggccaacatccacctacccagccttcacactggtccttgcagatccaaggttcaggctcactctagtagaccaggatgccaggccagcagcacctgtgtaccaaggctccaggacctaccctgctgacccagactccaggccagcccckgtagactcaggctgcataatctctggacaggctgactggtgaagggctttacccaataaagtcactctgcaaagactggaacaagtctcagcttcttcaaatgtgcaggtgccaacacatgactacagggatcaagaacagtcagggaaacgtgacaccagtcaaaggaacacaataaggcacctgaaccaaccataaagaaatggagatatatgaactgcctgacaaagaattcaaagtaattgtttaaggaagctcaatgaatttcaagaaaatgcagataaacaattcaacaaaatcaggaaaacagcaatcaaaatgagaaattttgagattgaaattattttttaacaaattctgaagctgaaaatgcaataaatggaatgaaaaatgcaaaagagcattaaaagcagaattgagcaagcagacaaaagaatctgaactcaaaagacaggttatttggctagactaaggaaaaaagagatgactcaagataaaaaaaataaagagttgtgttttttgatgataaaagcaacaagtctttagctagactaagaaaaaaagagatgactcaagttaaatcagaaatgaaagaggaaccattgcagctgataccagagaagtacaagaaataagaggatcataagagactgaacaattatatgccaacaaattgattaccatagaagaaatggataaattcctagacacatgcaacttgtccaagcttaatcatgaaatgaaaaatgtgaacagtccagtgacaaggattgtatcagtcataaaaatatctcccaccaaaggaagcccaagacttggtgactttactgctgaattctagcagacatttaaagaagaactagtacagattgttctcataattttatgagaaatttaagaagagggagtaatttcaaactcattttgggagatgagcattacctagataccaaagccagacaagaactctccaggaaaagaaaattacagacccgtattcttaatttagatgcagaaattctgaagaaaataataactaaattcaacagtgtattagaaggatcatttactgtgatcatatgggatttacctcaagggtacaaggattatccaacagacctgaatccataaaatgtgatatacaacattaggagaacaaaggccaaaaccatgttatcatttcaatagataattgagataattgagaaaaagcatttgacagaattcagtattctcttgtgctacaaaattttaaaaaattaagtatagaaggaatgtacctctataaaataaaggccatattgacaaacacactgctaacgttatactgaatgttgaaaagttaaaagcttttcttttgagatcaggaagaaaacgagaatgcccacttttgccatttctattcagcacagtaccggaagtccttgcaagagcaattaggcaagagaaagaaaaggcatcccagtaggaaaggaagacattgttgtccctgtttgaagatgacatgatcttgtatatagaaaaacctaaagactccaccagagaattgttagaactgataaattcagtaaagttgtaagatataaaatcaagatacaaaaatccgtagaatttctgtacattaatgacaaattatctaaaagaaaaatcaagaagacaattccatgtataataggtaccaaaaacaaaacatgcagtggctcccagtatcagtggttctgcatttgcaaattgaaccaacatttggatgaaaatatttgagaaaaaaatacaacaataaaaatactgttttcttatacaataaggaaactacagtatagcaactatttacatagcatttacgttgtattaggtactaagtaatgatttaaagtatacacgaggatgtgtgtaggttgtatgcaaatactataccattttatataatggacttgagcatccatggattttggtatctacaggagatcctggaaccaatatcctgcagataccgagggatgattgtacttagaaataactttaaccaaagagttgaaaactatgtaacattgattaaagaaattgaagatgatacaaataatggaaagttatcttgtgtttatggattggaagaattaatattgtaaaatgtttttattatccaaagcaatctgcagttttaatgcaatcctgatcaaaattccaatgttaaatttcacagaactagaaaacagtgctaaaatttatatggaaccacataagatcctaaatagccaaagctgtcatgagtgaaaagaacaaagctggagacatcacactatctgatttcaaaatatagttcaaagctacagtaattataacagcatgatagtcacatagaagtagacaggccaggcacagttgctcacacgtgtattcccacactctgggagactgaggcagaaggattacttgaaaccaggagttcgagagcagcctgggcaacatagtgagaccctgtctctaaaattaaaaaaaaaaaaaaattttaaagccaggcgcggtgctgtgtatctgtagtcctagctacccgagaggctgaagaaggaggattgcttgagctcaggagcttaaggtggcagtgaactgtgattgcatcactgcactccagcctggatgacagcgtgagaccckgtcttttaaaaacaaaagaaacaaaaaaacagacacatcgacccacaaaacagaatggagagcacagaaataaattcgtgtactatcagttgattttggacagggtgcaaagaacacagyggggaaagggaagtctgttcaataggtggtgttgggaaaatggaatatctacatgcatgagaatgaaatcagacctgtatctcacatcatataccaaattcaagttaaaatggattaaggtcttaaatataagacctgaaactgtagaactaccagaataaagtataggagaaatgtacatgacattggtttggacagtgatttttttggatatgaccccctcgaagcacaggcaacaaaaataaaaattgatgaatgagatcacatcaaactaaaaagcttctgcatggcaaaaagaaaaaatctacagaatgaaaaaactcacagaatggaagatagtatttccaaaccatatatctggtaaggggttaatatgcaaaatatataaggaactcagacatctcaatagtaagaaagcacctcacttaagaaatgggcaaaggacttgaatagacatttctcaaaataagacatacaaatggccattagaatggctattaaagtatgatgaggatttgcagacaagagatatmttgcgcatggcaggaatgtaaattagtacagcatttatggaaaatagcatgacgtttgctcagaaattaaaaaatagaactaccatatgattcagcagtcacacttggatatatatgkwtttatatatatatatatatatatatatatatatagaataaaatcagtgcgctgaagagatctgtactcccatgttcctttcggtatcatttgcaatacccatgatacagcatcagcctaagtgttcatggataaagaaaatgtggtatgtatacacagtggaatatacttcagccataaaaaggaggaaatgctgtcatttgtgacagcagggatgaacctggagggcattgttgaaagtaagccagccacagaaaggcaaatactacatctctcttaaatgtggaatcttaactcagggatgtaaaatggtggttaccaggggctgggggtgagtggactgggttgcagaggtgttggtcagaggacacaaaatttcaattaagaggaatttgttcaaggtatctattgtacaacatggaaactagttaataacagtgtatttttggaaatcactgagagtagattttaaatgttctgccataaaatataagtatgtgaggtattgcatgtattaattagcttgatctagccattccacagtgtatacatattttggaacatcatgtgaatacaataaatatgtatccttttttttgttttttgtgtgttttttttttttttttttttttgagacagagtcttgctttgtcacccaggctggagtgtagtagcatgatcttggccactgcatcctctgcttcctgggttcaaatgattctcctgcctcagcctcccaaatacgtatcatttttatttgtcaccaaacctggtgtcttgacaggtgaaaggagatatgagtatgagtgaaactcttacaaagatagctgagatgatcattgtcagaggttttagtatgtctaacaaagacaagggagtgatttgctgaaatgaggaggtgaagatgtctcaaatttagaaaggcaaatattttgggggcctagagtattgggatagaaccatgtacagggacattgaagtcactttgctgatgatgtaactgggggcaaagtggaggcttaaatatgtgggtttaattgaccagaacagggagggaaagagaaggcattcggttagatgacatgagtttcaaattacaagctgtttttttgttgtttttaatacagggaattttgccgtttatttttaatacagggaattagaagaataatggtggacttaggagttttaggagtcacataaaagggttgcatgataggcagtgcctttggggaggagccaggctttcatgaaagctaagaagttgaggggccattatgtaaagtagttgaagatgggggatagcctatgggtcttcagaaagcctctgggtttctagagatctttctggaagaggttaggaggatgagtcaagtttagaatggaagaggatagatgaagcttgcatttggtagtaaaaaccaaggatgaatgtgtgaggcatgattatttgtcacaagtttccaggtgacactctggcactcagtccttgttgaattaagcaagctttcttactgttttacttggctgtgttaaagtagagtaacaggaaattagacttcccataatgtctcaatagagctgtttaagtttctagccataattggtatgggaatatagctctaaaccttcaaggctgctaccatttctcacattyctatatctagaaactgtagccaggcagcactttcagtgaggtgagtgggtccaggtttgttcaattacttttgtaccaacctaataccttaatagtatttgtcctaatttacaaaaataggtaatgaaggattcttggttttacctcagagctaactgtccattaatggcaacatcccacatttgttgaagcatgattttgttgtttgtactttgacatgcatttgatattttaagtaacgccttgaatgcatcttaaataataatttatatacagttaacactcctgtttgtttttaggaattcttagtgttgccaatttcctaggatgtagaagagcatagtaaaaaaaaaaattattaatactcttaaacaagtgtttttaacaactggacaccattttgtagttaagcctagaaacagaactaatgcaataacccagatcttttcatttattcatatgtttattttacctggatttactttagttttttgttttgtttgcttgttgtttgagatattgtcttgctctgtcataagtgatacagctagagtgcagtggtgtgatcagagctcactacaactttgaattcctgggctcaagtgatcctcatgcctcagcctcctgagtagctgggactacaggcatgtgccaccatgccaggctaaaacagtgtttttgtttgtttgtttgttttttgtagagacagggtctcactatgttgcccaggctggtcttgaactcttggccccaaagtaatccttctgccttggcctcacaaagtgctgggactacagacgtgagccaccgtgcctggccatggattttgtttaaatttataaataccgtgttgtagaatctctttgtatgtattaatttagacaccttagttttcttaatgatttcataccagtttctcagtaacttcagattttttttttgagatggaatcttgctctgtcacccaggctggagtgcagtggcgcaatttggctcactgcaacccctgcctcccaggatgaagcaattctcctgcctcagccacccgagtagctgagattacaggcatgtgccaccatgcctggctaattttgtatttttagtagagacagagtttcaccatattggccaggctggtcttgaactcctgacctcgtgatctgcctgcctyggccttccagagcgctgggattacaggcttgagccaccgcacccaaccagatcagattttttatgtttggtatttactctttacctctaacactaaggctatgtttccagatgtataactataaatggagcaggggtaaatacaacaagtgatttatggttcagtaaagcaagttagttttaataaatgctcagtttactgtaaatgtcagaaatgccccaggactctgtctattgacaactcttctatttccatcgtcagctcttgccctctgaactgtagactgatttatccaacagttaagtctggttctcaaacttaacctgtcctaagtggagctcctgattttcatcatcccaaacctacgtctctcataatattttgccatctcagtcaataacagcttttttcccctcctgtgcagccagaagccttggaagcatcttttaatttctctatgtcacatactcaaattattggtaaatcttgttggctacaccttcaaaatacccataattcattttattttttttaaccattatacttctgtttactctgtttaaaggcatcatcttttggcaaaagaaagaaattgtttcccaggagtcttgtgctttacagtgtattctctagtagcagccggaatgatctttttaaaatctgagttaaaccatgttatttactatgcacagaacttttcagaggcttcccatcttaaaagtaaaatctggagatttacatggccctgtgtgaactggcttcctttcatttctgtgatctctctaccgcacttgctcatctctgtctaaaatggctgtatctttgtcatcttaaggcttgtaactattgtctgtgaccctgtgacccttctctgtgataatccatgtggcttccttcctcacttgattcagagagctctctgctcaaatgatgcttttcctgaccggctgcatcaaagaatgatcatgttcttctgcattccccttaacttgctgcatttttcttcatgggatttaatgtcatttgacttcttgcatattgatttctttgttgttttgcttctttaccactagaatggaagcctaatgacagtgcctggcatacagtaggtagtcagtaactacttcctacatgaaagaatgaagctagtaaatttatgcaaaatgtttgtttctgcctttttaattatcttgcagaaatgtaggaagaattttttaggatcagtttatgtatatatataaactgataagtatgtacacagcctgtagaatgtgggtaataccacctatcatctttttgagcatttaccatgtagcaagtgactgtgctccataatccacatgcattatcttgaatttgataggagagctgagctttttaatcagagtagaccatagaaatatagcttggatgcttttatttcctatatgacttcttcggtgtacttacacatctataagcatttatgggtcaagtaacatactgaaatattttctgaagtaaaagaaatctctttaatcaaataagtggttctcctataggttctcatatcatattcttggtctccagattgagaaggtccttttgtatgcttccagtatactcgaaaccaggaggtagtctgacatctatttcccttcaaggtcaaataattagagaaaggtttaattgacactgttatcgagacagtatcagaagagaaattgaaaaatctctgttgagactctgtaatttgctaggttctgaggatacgacagtaaataagttattaggtcatatacctcagcttcccatttaattaataggcagttattatatataatagaataggtactggttggtatgagactacagaggaagaatacctaattatcttaaaagtggtatataagctgaaaccttgaggatgcttgggaatagctaagaatcatastgttctaggcaggaagaataacacctggaatcagagaagacagcagaacaagtccactgagtagtaagaagttccgtattgcagtaatgtagagttagctgatgggagaaggtgtgaaaaaatgcatttggatgtagaaagccaggagcacgctaaggccctttgctttcttctgacagacacaggagcccatgaaaggcatcacgtgtggaaggaagtgacacgagtcatagtctgccctgcttttctaccacctgaagcatcatataaacctatatcttctgtttcaaatgtaaggaaacatacttctagttcacagtagggatagttgaatggatgaactgtttctggctgaatcttctcaaagtagaatgagcaaaacatggctatattatgagattatctaaggaaagatttttataatcatgtgaattttgaatttctttatatcttaattattccaagagatttttgggaacattaatgagaatagtttacctttagtacatagaacttcttgtcagctataaatgaggatcaaacccaaaagagattaacaaaaataaaagggatgctatttccccaaattagcagaactttttgattcaccgagttctttgttttttaactgctgtctgcctcttaacataattgagtattcagtgatataatataaataaatcacttactaaatgctgatgaacgcttgtttttactaacatctcagcttgtagcatatcttgttgcccataccagaaaccctacccattacctctagctcttccagcttatttacctcttacaaactacttattttaaatatttcctgggtcaatttcatctttttttttcttcctactgctacattatttgtccggactattacagtagtcattacctaactggattgcttgcctccagttttgcccactttggtttcagttattgaaaaggcaaattttgtcagtcacttaacctgcttaaaacccttcagtgactccttgtgttttagttcttatctaatggtttatgaatgtagtgggttacgaatcttccggaagagtgcatttgcactcctgaagtgtgcatgtatttttatgaggagaagatctttagcttttattagattactcctcttttggctaaaaaaagaattacttatcatggctattgaggtcttccatgatctggcttttccctgcctctccattttcatatttttgaaacttttcttgaactttaggctcttgaagtgcttggaattgtcttataatatcatgttttcaggcccctgtgcttttactcattttcctctatctgaaacattcttcccctgtctgaaacattcttcccacccatagtgtcatcagctcctagtcatcttttgtgattcacctctcctaagttgcctctctttttattgctattcctctgtagtcatctctgtgatattgaaatcgtggctttctctttctttagacatcataattccttgaagagccctttttatgtagcctgacaagcagaatttatactgaagtagacatttggaagtcatttagttattgctcaatccttgaaagatgaaactgtccaaagggaaatttaaaagggaaagtatctaatagctgatccctggagaatacaaatgtctctagatttggaagggaagtctctgaaaaacagccagagagaagggaggaaaccaagaaatagtgtcctagacccaaaagtcaataatttccaaaaggtctatatttcttaggaaggccaagtaaaataagtagtgaaaagtgatgacctgactagagcagattcttcatttccagttacagaagctaggttataggtacagtaagctctggacatgttcttttcccacatggaacgttattcgtgttctccactgctgctttgaactattccttttactctctcagcataaaaatccctgctcctttgaagcttatgccttctggttttgtcttcctctgtctgccttcagtgagctatcagtttcttctcggtttttgaggactgctacctgaacttattcttcttcactctttcccaaatctgctgccatctttatttatatgattaacccctcagtccctagcaagtcaaattcccatccgtttttatctacagtaatgttcacctctgcatcactgctgcttcccatgtctacaggcatgccaactcaaaactgttttaccccaaaagcttcrgtgaaaacaccttacctcaggttgccgtctttgaatgcttttctactatcttaaacttgttttctttcattgcgccttttcttccttctsttagagacttgtcctatggctcttctactgtcttccagctacaattccctcttgttcctgacatgtactgctcagagccaggagatggataagtagtagtatttcacatgtacttttttctctggggagcagtagtcatacaataattgattaagataaaacaggtttttatcagtttatataagaggtaaagaaaacaatggggtagagttttaaaaattgtcaaaaacaacacattttaccatattaatgatttgaagtgtacggtacaattgtggtaactgtgcacattgttgtgcagcagatctctagaactttttcatcttgtaaaacagaaactctacattcattgaacaactcttcttttcccccttcttcctattccttggcaaatgccattctactttttgcctctaaaatttgactgttttggctacttcatgtcagtggaatcattaagtatttgtcttttgttgactggcctatttcacatagcaatgtcctcaaggttcatttgtgttgtagcatattacagaatttctttcttttcttttaggctgaataacattttgttatatatgtataccacattttctttaaccatttgttgatggatgtttaggttccttccacttcttgaatattgtaatgttgaaataaacatgggtgtacaaatatttttttgagaacctgtttttaatatatttggaagtatacccaggtgtaggattactggatcatatgtattctatttttttttagattttttttttttttacaggagttctaggttcacagaattgagaggaaggtacagagatttcccctgtacctccttccacacamatgtatagattctctcatagccagtgtgcatctcccaccagagtggtacatgtctttctgatgaacctatattgatacatcataattacccaaagtccgtagtttatattagggatcattcttagtgctgtacgttctgtggctttgaacaaagtacaatgacatgtatctaccattatatcatacagaatgttttcactgccccaaaatcctctgtgttctgcctatttatctttccttccctcccactccttggcaatcaccgatccttttactgtgtctctaactttgccttttccagcatattatatacttgtaatcatacagtatatagycctttcagcttgactatttttacttactaatatgcattaaagtttcttccatgtcttttcataggttgttagtacctctctttttccattttctggacatatcacagtttgtgaatgaatattcacctaatgaaggacattgtggttgcttccacattttgctaattatgaataaaactgctgtagatatcggtgtgcaggtttttgtgtggacttaggttttcagygactttctgtaaatactagggagtgcaattgctggatcttatggtaaaagtgtttagttttgtaggaaacatccaaactgtcttctaatatgacgctatccttttacatttttcaccagcaatgagtgagtgtttcttttgctctacatcttcaccagtatttggtgttatcagtgttctgaattttgtccattctgataggtgtgtagaggtatcttataattttaatttgtgtttctctgatgccatatgatgtgtgggacatcttttcatatgctgaattgccatctgtatatctttggtgaggtgtctgttaaggttgttggccaattttttaattgggttgtttgttttcttgtggaattttaagagttccttacactgtctctgtctgtcttgtctgtctgtctgtctgtctrttgagacagagcctcgctctgtcacccaggttgcagtacagtggcacagtcttggctccctgcaacctctgccacctgggttcaagtgattctcctgcgtcagcctcccgagtagctgggtttatacccgtgcaccaccacacctggctaatttttgtatttttagtagacacggggtttcactatgttagccaggctggtctcgacctcctgacctcaggtgatccacccaccttggcctcccaaagtgctgggatgtgagccaccacacccagcctccttacacattttagttaatagttctttatcagatgtgtcttatgtaaatatttcctccctatctgtggcttgtcttttcatactcttgacattgtcttttgcaaaagacaacaatttttaagaaacaagtagacaattttaatgaagtctggcttatcagttcttttcttcatggttggtacctttggtgccgtatctaaaagtcatcaccaaacccaagatctagattttttcttatgttatcctctaggagttttatagttttgagttttacatttaattctctggtttattttgagtttatttttgtgaagggtgtaagacctgtgtctagactcttttttttttttgcatgtggatgttcagttattaccackgtttattgaaaaagactattttcttcattgtattgcctttgcctctttgtcaaatactgccattgctcctttgactatgtgggtccatttctgggctctctattctgtttcgttggtctgttttgtcagttcttttgtcagtaccacaccatcttgactactgtagctttacagtaaatcttgaaatcagtagtgtccatctgactttttctgtcaatattgagttgtctctcacgggtcatggaatagctcttcattatttagttatttgatttctttcatcagagttctaaaacatttttcctcatatatcttgtactaattttgttagatctgtacttaaatatttcattttgggacacgctaatgtaaaatggtattgtgtttttaatttcaaattcaacttatgcattgctggtttacaggaaagstattaacttttttatatgaaccttgtatcctgcagctttgctataatcacttattagttctaggaggtttttgttgtttttctttttctttttttcaattcctgtctatgttctacacatatagtcatttcatctgcaaacaaaggcagttgtatttttttgttccccgttagtataccctttatttccttttcttgtcttagctaggacttccagtatggagtggtgaggtggggatattcttttcttgttcctgatcttagtaagaaagtttctagtttctcatcattaaggatggtgttagctgtatgttttttgtaaacgttctttatcaagttgaaggtgttccctctattcctagtttactagtttctatcatgagtgggtgttaaattttgtcacatacttctctccatctatggtatggtcatgtgatttttcttctttagtctgttgatatggtgaattgcattaattgattttccaatattgaaccagtcttgcatacctgggataaatcctactttgtgctggtgtatacttctttttatacattgtagtaaaatttagtttgctaatactttgctaatacaaagatttttgcatctttgttcatgacaaatatggatctgtagttttcttttctgataatgtctttgtctggtttgggtattagagtaatgctgacttcatacaatgagataggagcatctcctttgcttctgtcttctgaaggagattgtagagaactggtgtggtttcttccttaaatgtttagtagaattcatcagagaatccatctgggcctgatgccttctcttttagaacattattaattatggatttaatttctttaatatatgctttttaatcaagattatttcttcttagagttctaatagattgtgtcttttaaggaattgattcatttcatctaggttaccaaattcgtggccgtaaagttgttcataatatcccttgattatccttttaatgtccatgagatctgtaatgatgtccactcttttcattctgatattagttattttgtcctttgtctctytttcttagcctggctagaggcttattgattttattgatcttttcagagaactagttgatttctttgatttttctctattgatatcttgttttcaatttcattgatttctgytctaatttttattacttctatttggatttaatttgctttttctagtttcataagttggtagctcagataattgatttttagatcattcttttcttttcttttttttttgagatggagtctcgctttgtcgcccaggctggagtgcagtggcwcgatctcggctcaccgcaagctccgcctcccgggttcacgccattctcttgcctcagcctcccaagtagctgggactacaggcgcctgccaccacgtgtggctaatttttttgtatttttagtagagayggggtttcactgtgttagccaggatggtcttgatctcctgaccatgtgatccacccgcctcagcctcccaaagtgctgggattacaggcgtgagccacagcgcccggcctagataattcttttctaataaatgcatcagtgttgtatgtttctttctaagcgctgctttcactgtatcccacaaatttggataagttgtgttttcatgatattttcaatttataatggtattgggacacaacccaataagtaagtttaggagcatttgtatgcataagcacaattgttgacattattttgaacaaattcttatttgttagatcaattaagtataagaaaaataaaaggttttattttactttcagtgtttccttcttttgatgctctatatatgtagatttcagtttctgaacttcccaacacttattgcaaggcaggtgtactgacaacaaatttccttaatttttgtctgagaaagtgtttctttttaacttttgaataataatctcacaaggtagagtgctaggtttatggtttttttttctctcaacactatgaatatttcactctttttcttgttggaagtcacatgtattttttcttttttttctttttttcctctacaggtaaggtgattttttccctctggcttacttcggatttttttcttatccttgaatttctgtaattacaacgttttatgcccagatgtagttttttggcatattttcaagctcagagattcttcatccatgcccagcctactaataagcccatcaaaggcattcttcatttctcttacagtgttctgttttttgtttttgtttgtgttttatctctagcacttccttttggttcttaggattttcatctctacttttttaacatgttgtttactcagttcgttagggcccttagcatattaatcatagttgttttagattccaagtttgataattccaaatccctgctgtatctggtcctggtgcttgttttttaccttttattatgccctgtaatttttttcttgatagcttggacatgatgtactaggtaaaaggaactgttgtaaatgagcatttagtaatgtggttgtaaggtgtagggagaggagaagagttctgtagtcttatgattaggtcagtctttttagtgagcttatgcctctggactgtgaacttcacaagtgtttctcaatcccacccctccctcattcccttagttagaacaagatagctataatggcctgaagttgggttatttctcttcccccacatcattttggctttgctacaaccccagcaggttaggctctggttaactagtttctcctgaggacaaaccttgttaagacyggaatagtctagtgtacttgaaaatcatttctctttgcctcccctgctgagggttgaggatttttctcctatatttactgtgagaagctggtcaattgcctggatgtaaaacttagaaaattgtagggctccccctataattgggtaactctggagtttttagctttcagagttgtccacactgagccttcatcaatttgtctattacacttcaggatttcctaccccgtggaggtttctgcttgtgtttttcatctcagataaatggtgatgctatgtgttcacctgttctctgctctcacaggcagtcatttgccctgtgacctcacttatcctatctcagatttgtttatttttaagtttgtcattttttacttgttgttaggatggagtggtgacttccaagctcttcatatgtggaactggaggtaattctatttcaaattttttgagggaccttcatgttgttttccacagtgcctggcaccattttacattttcaccagtggtgcataagggttccagtttctccatatcttcaccaatacttattttctgtttttttaatggtggccatcctaatggtttcagatgatgtatcattgcagttttaattgacatttctccctactgatcagtgatggtgagaatcttttcatgggcttattgcccatttgtatatattctttggaaaaatgactattcaagtcctttgtccactttttaactagattttttgttgttgaattgtaggagttatttatatattctggatattaaccaaataacagatacatggtatagaaatattttctcctgttttgtaggttgccattttactccatttactgtttgctttgtagaaatttttgagtttatgtatccccagtttgtctatttttgctttggttgcttgtgcttttggtgatctattcaagaaatcattgccaagtccaatgtcatgaagctttttctccatgttttcttgtagtagttttataattcgatgttttaagtttaggtctgtaatccagcttgagttcatctttgtatatggtgtgagataaggctccaacttcattcttttgcatgttagattccagatttcccaatacagtttgttgaagaacctcttttccctatttctgtgttctctcttctgctcacttggtctgtatatctgtctttatgccagcaccatagtgttttgattactatagctttgcaatatctttagaaatcagggaatgtgaggcctctagctttgttttttgtccagattgttacggctattcagggtccttcaagattctgtattaattttaagattttttttttctgtttctgtagaaaatgccattgggattttgatagggattgctttgaatttgcagattgctttgggtagtattgccatcttaacagtactaaatcttccaattcataaacttggatgtctttccatttatttgtattgtctttaatttctttcagcattgttgtataattttctttttcttttttttttttttttgagacagagtctcactctgtcaccaggctggagtagagtggcgtgatcttggctcactgcacctctgcctcccaaattcaagtgacaactcctgcctcagcctcccgagtggctgggattacaggcgcgcgccaccaagcccagctaatttattttgtatttttagtagagacagggtttcaccatgttggccaggatggtctcaatctcttgacctcgtgatcagcccaccttggcctcccaaactgctggggttacaggcgtgagccaccacgtccggcctatgttgtttaattttcaatgtacatgtctttcatttgcttggtgaaaatattccctaagtattttttactctttgatttcattttaaatgggtttaaaaaattaatttcctttttggattcttcatttttagtatttagaaatgcaactcttttcttaatattggtttttatatcctgtaactttactgaattcctttattctaacggttttttttctttttggtaggctagagttttcaacataaaagatcatgtcatttgctaacagaagtaattttacttcttacttttctcatttaatacctttcatttctttttcttgcccarttgctaactctggcaggatgtctaacagtatgttgaatagaagtggtgaatgtgtgcattcttgttccatttgtgatcttagagggaaaactttcagtttttcatcattgaataacattagctgtggtctttctatatatggccttcattatgttgaagtaatttccatatctttctagcgaattgagcgtttttgtttttgtttttttgagacagaatcttgctcttgtcacccaggctggagtgcaatgaygctatctcacctcactgccagctccgcctcccgggttctcaagtgattgtcctgcctcagcctcccgagtagctggaattacaggcgcccaccaccaygcccgattagtttttgtatttttagtagagacagggtttcactgtgttggccaggctggtctcacactcctgacctcaggtgatccacccaccttgcccttctaaagtgctgggattacaggcatgagccaccctgtctggcctttttttaaatcctaaaagggtgttgatttttgtcaaatgcttcttctgagtcagttgagattattggtttttgtcctaagaatgcagtgtattaaagtgatttttttgtatgttgaaccatccttggattttatgaataaattccagttgagaatttatgaaatataatctttttaatgcattgttgaattctgtttcttggtattttgttgattttttttgcatcagtatttattagggattcttttttcttgtaaatttgtctgatttcgatatctaagtaatgcttacctcataaaatgattttgaaagtgttctgtcctctagttttttcaaagagtttgagaagggttgttagtttttaaatgtttggtagagttttcagtgaagccctggcgttgttggacagttactgattcaatctctaatagttataggtccattcagaagttgtatgtatttgtggctcagtcttggtgggtttgatgtgtctatccgttctcaaaggttatcaaatttttttgggtcatagttgttcatattagtcttttaaggtcctatttatttctgtggcagcagttgttgtatcgcctttctaatttccagttgttgctgtttgtgtctattctcttcatttcttaatctaagaatttgccagttttgttgatcttttcaataaaacagctactcctaattttgttgattttttttctattgcaaaaattttctatttttctctattttattttagctgtaatttatttttattttttttattttttggtaagtttgagtctcatttgttcttcatttcctaattccataagatgtaaagttaatttgttgatttaaggtttttcttcctttctaactgtgaaatatgacactgtaaaacagattttcattttacagatgaattatgtaaatatttagttctacaattttacttttttttttatcatatatcacgcattctggatattgagactataaaaatgaaaaaaacagttcttttcttttcttttttttttttgagacagagtctcgctcttttgcccaggccacagtgcagtggctctgtctcggctcactgcaagctccgcctcccgggttcatgccattcttctgcatcagcctcccaagtagctgggactataggcgcccaccacggcgcccagctaatttttttttgtatttttagtagggacgtagtttcaccatgttagccaggatggtctcgatctcctgacctcatgatccgcctgcctcggcctcccaaagtgctgggattagaggcgtggcgtgagccactgcacccggccataaaacagtaattgaaggttaacctatatttcaaacaactgaaaatactgatttgttcatatttattttttcatgaaaatcgtcttgttctatatttaataggtttttgttyggttcatggtactaatgagttcacaattgtaggtttagtcttgaaataatctaaattcacttcatcccattgtaacagaccctacatcatactgaatatagttgtgtcacagatgtctcttacagtctatttctacaaggcctagaactatttaggataccgttgctcactcttacaaattttaacattaaaaataactttgagatggaatggagttttgcaacgtctcagaacaaagagactccacttacgagaaattactaagcagtggttcctagctttatagactaattatataagccttcagttgtttctattttatatctgttttttagattcctcacatgttcattctgctttaccttctgtataatataaaggtcactctacttacagtcacattttccttttaatctttccgtttttattttttattctttgctttgttcaccattagtttttatattgcatctcacagttcatgtttcttttttgtcatttctgattctaattgtaattctaatcttacttgtttggcgttcactgtcacatcttcactttctggcagctgtttctatggcttcatcttcttagtgcttgtattcattgcttatattccagttgtcttgtaaattcatttttttagtgaactaagccagacacggaaagacaratatcacatgttctcactgatatgtgggaactaaaaaaacattgaacacaaattttacagctgacacacatatgcctgccacctagattctgccattaatacttacattgctttatcgtataaccatccttgtatccatcaatccatcttaatttttatgcctttcaaagttaattgctaacattagtacacatccctctaggtgaaaccatttttaaactgattgctgtcaagttgtctagagtaaactctgatcttccaagtatgacttattccataggacttctgtttgtagcactgtcccattaattcaatcatagaaataaataattggaaagtattgtctgttttaaatggataagtattttcatgtgtctgactttagaggacttttactagaaggtctcacttgaccttcattgctgactaaataagaaaagtttgttttattttaaaaatcaacacattataacatactttgttttttgagtaataagaaaagtcaatggaatgtgaagaaattatagcaagtaagctgttgttcctcttctaggaattttgattatgaacagctgataaggtattactaagggatctcatcagggaaattcctttctttccttctttttcttttgcatcctctccctttcctcactttcttttcccctttttcccttttcccctctcctcttcttttctttaatagtacttggggaaaggtataccttttattttacgkatttgctcagggtaaagagagagttaagaggccaaatgattagatggcagggtcactggagggcagagataaataatagatcctaaactaagggttggcaaacattttctgtaaagggcaggtggtatttgttttaggttttgcaggcctaaagtactcaactctgccattgtagtatgaaaaacagccataaactatatagtatattgtattagtcctttttcacgctgctgataaagacgtacctgagactgggaaaaaaaaaagaagtttaattggacttacacttccacatggctgggaaggcttcagaatcwtggcgaaaggtgaaagacacttcttgcatggcagtgacaagagaaaatgagaaggatgcaaaagcggaaacccctgataaaaccatcagatctcgtgagacttactaccacaagaacagcatgtgggaaactgcccccatgattcagattatctcccagggggtcactcctacaacacatgagaattatgggagtacaattcaagatgagatttgggtggggacacagagccaaagcattatcatatatagtatatttataaatcaatgaacttgggtatgttccagtacacttgatggatactggaacttgaatttcttataattttcacgttacaaactattattatttttcaaactttttccagccatttaaaaatgtaaaatattctaagcttgagagacataaacaggtggtggactcgatttgacttacgagctatgatttggtgacccatatggtacaaggatttcccttgcgcaggaactataccaaaaagtcgttattagtgtatacttttccaacgtagaggcccttttatgtgctctaaattttgtatgccttttacatatcctaaattagatagtgatgcagatgaggtcagataaattaaggtgtcattggagtgaggaaaaaagaagaatgcttaatatagttgattccaccattaacttggaggttctggcatggcttcctttagtcctgtctcatcagtgtagctgctatttgttaaacttggcacagaaaggcagatcaaatatagagggctactttcagatcctcctcttaatagttattaaaagctcaagtttagtagctgagttcaaatctcttattagatgtatgacttatgtaatttctctgagcatcagcagaatgaaggtttatagtgctaactcatacacttgtgagggtgatagtaacaattacaacaataatagtagtagctaacactttcatagtgcttagtatgtgccaggcaatgttctaagcactttatatatattaacacatttaattttctcacaattggtaatgtgaagaagaataatactctcaccatgataatgctcgtagatactaycatttaaattacgaggaaacttacgtccagaaagatcaagtaattcattcagggtcacatagttaattaagaggtagagccattatgtgaacttgggcatctggcctcagaatgcgagctcttaactgttaaggtttattcccctctaaagtgggaatgtctataaaatgcatagcacataggtcctcaacaaattagagagaaattaactttgcagaatatagtggttccatttcctcaagaaacttggtctgcctttgtggtaccagatagatgcataaatgtgaggttcacgttatgattcttcagatttttttcccagttgcacattagttatgagatttttttccatagaattcttcagtattactcatgttaaaaaataattattttgaaatgaatcaccttctgcaaaacaatatagtcaaaatgacttagactctgaagctgaaagactcctggactcctattcttgtcttggttctgtactttctttgagatcttggtttcgtgatttgactccagttctatttctctctttggctgtggactgaagataatcctcaatgtcatggtattcaaatgagataacccatgtcaaagtgccccgcagtgtgtgtaataagttatcaggcatccagcaaatactagtttcttgctcacctccctattacataaaataactttaaaattagaactgaagggactcataaagctgggaaaactgaggcccagacaattgtttccctaggatcctacagctgcttagggacagaaggatgacacttaatgcagatcttctgatttttcagtctcgttctgtttgtgctgatcactctcctcctatgtagtatataaagaagtactatgtatctgacaagttttggggaggttattttagtataaaagctcacattaaaaatatctattttggtattttgacttttgtaatttttttaaaaatcagagacaatttagtaaatctcggggccattcaaatcatgtatatgaagttttataactgctattgttttccccttatagttattaatttttaatatgcaagtagcatccttactatggaaagaataaataagaaatcaaaagatggaagaagttttaaaactcacttaatcacatcatccagagaaaatgctattaatgctttgaaataacaatgggttcatcctacacctgctactttttaactgacttttgtcagttagtgatatatcaggaagactaggcagttctttgtcgaattcaaatcttgatagtttttattttattgtgtgacctattatcagttcatttaagtaatcttttattagacatgtttttttcagatatagaaacaatgcatttttgtaaaattgtcaaattattttccacaagtaggatctcattcacacggtattcgtgtttttaagactttcgatacatgttcactgttttcctccagaaaggaaatacctacttacattttcaccagggaagtcactgtagtttgggagaacatgacattatctccctttctttactgaagggtagcaatatatattttaaattttctagattctgcatttccattttatttttacatgttttcactttcatattttgcatagtgctaaatctgtgataacagtttttaattttcaggtggggtttatagcttcatagatagcaaaatgtctttaagtcatgtttatgcaatttttacatgtgctttgtgggttttcttttttctctgtttgcatgcagtgagtggtaaatttgcatggaacatttgaaaaataagcaccagaatgaattgaatgtgtgtgaattatcactttttgtcacctacctggacagagagtgaaagttcttctgttgagacaaaattggatctcgtgtgtttcttcacttacttgctgccttgttaattgttgagtttctcatgattagcaagatgtaaactctggcattggtcatctagtcctacatgttagataattctgtgaatgttttgaaaatcagctgaactatttttcttataattttgattctttgtagttgttatttccatgcttgtgaatttgggaccaaaaggaatggctatgacttatgtttctttggatccagtagtttattctactgaaattatggtaattttatcagttagtagaagcatagactctttagtgttgaatataatgtcatctaacttcttacatggtcacataattcctccctcagttttggtagctctcctgaaacagccataataggacattaatctgtgtactttaagttgacagagtaaaaggaatataagatttcacgtgatggaacttaaaatattccatcttgtgacgtggaactaatgaggaggtttagtgacaagttttagatttaagattctacactttggagcctctttttctttttctttttggtttttgtttgtttgtttgtttttgagacaaagtctagctctgttgcccaggctggagtgcagtggtgcaatttcagcttatggcagccttgactctcaggctcaagtgatcctcagcctcccaagtagctgggactacaggtgcatgccaccacacttggctaattttttttwaaaaagtttgtagagagtagcctcactatgttgcccaggctggtgttgacctcctgggctcaagtagtcggcctgcctcagcctcccacagttatgggattgattacagtcatgatctgcctcactcaggctgcagccgctttctttcagtgtaacactatctttggatattccacttacaaatttatttttaagtctcccatgttgttgataattgggaaaaatagtttttattccagatagatattctgtgttaactataagtcraatgtttacaagctgttaaaaatgaaatactgattatgtaaaagaaaaccggattgatgctttaaatagactcattttcctaatgctaatttttaaaatgatagaatcctacaactcttagctgtaaaccttgtgatttttcagctgttgtactaaacaacttaagcacatataccatcagacaagcccccctccccccttttaaaccaaaggaatgtatactctgttaatacagtcagtaagcattgacattctttatcataatatcctagaaaatatttattaactatttcactagtcaggagttgtggtaaatagtgcatctccattttctacttctcatcttcatacacaggttaatcacttcagtgcttgactaacttttgccttgatgatatgttgagctttgtacttgagagctgtactaatcactgtgcttattgtttgaatgtttggtacaggaagcgagcagctgcaaagcatctaatagaacgctactaccaccagttaactgagggctrtggaaatgaagcctgcacgaatgagttttgtgcttcctgtccaacttttcttcgtatggataataatgcagcagctattaaagccctcgagctttataagattaatgcaaaactctgtgatcctcatccctccaagaaaggagcaagctcagcttaccttgagaactcgaaaggtgcccccaacaactcctgctctgagataaaaatgaacaagaaaggcgctagaattgattttaaaggtaagatgttttattttcaattgagaattgttgcctgaaaaccatgtgggagatttaaatgtattagtttttatttgttttttcttctgtgacataaagrcattttgatatcgtagaaccaattttttattgtggtaacggacaggaataataactacattttacaggtctaatcattgctaattagaagcagatcatatgccaaaagttcatttgttaatagattsatttgaactttttaaaattcttaggaaaaatgtattaagtggtagtgaatctccaaaactaggccacaacatctatttaagttatagaataactggactaagtatctggcatgagttctggaacctcaggatgatgtgatgaaagaagcagaaagaggaaacagtgggttttttccatttttgaaggcaagacaaaattttgtgatagttatgtgagaattctacgtttccttcagatatatgcttctcactctccttccggacatttggtacagtcatgctgccaaggatcatgacctaccaatgacagtcttcactcaggtcttttgttttctaaatggtcctacgtccaaaattcagaattcgattaccttgtcgctaatactaaaactccaagttattttcttcagtgaaggtaattagtaacaaagtaatcaaatttttgaatgactaccagggcttagcgcccctccactctcacccctacacacacccagaggcaattgtattttaagagagaaagctttttttttatgacatacaagtcagagaattttagaggcatttgcctctaaaactttcactaacatcatttgaatcaagtttgaaagaattagtgaagtggcattgtgttataacctctactctgtttccacaataaaattattttcgtcactttacacaactttgttgcttcagagtgtataattctgtttcatgaattagttcacacactatgggaaaataggtaaatgttgtctgtatatatagtgtgtcagtataatgtggaagctgcattgactttattgtacacagttctccagtaagtgtgcaccagagagtaccagtaactgaatgtagagtgctggcacagtggaatgcagccagctgcgggggatgtggtacatgaggaatgtgctcatctgctcttttggccacgtgctccatcttagaggtgcttattgtgtggctttatccagtctttatgccccctcctctttttgctcaagtctgcattatagcagttgtgacctttccttatccctgttttctaatatgctactgttactgttccctgttcgttactggtttttttgtttttgtttttgcattgttctatagttactattgtatattggaaattagagatgctttctgtacactagtactcttattttgattattaattatgtttgttaacactaattacaaagttgcataagtattaagtagtctgcaccaaactgtttttgcgtaggaggtttttaagtgcaaaatttaaaagattgagtattttcagggacacatttatcacaagaaatcttataaaaatgtctttctcagtagaacacctgtatcaataaaccaaactttttgaatgttcatatctaattacagtgttttttgactaatttttatctatatacctgaaaaattcagtttaacatattaaacactacaggccaggcacagtggctcacgcctgtaatcccagcactttgggaggctgaggcgggcgaatcacgacgtcaagagatcgagaccaacctggccaacgtggtgaaaccccctctctactaaaaatacaaaaaaattagccagttgtggtggcgtgcatctgtagtcccagctacttgggaggctgaggtaggagaatcgtttgaacccgggaggcagaagttgcagtgagccgaaatggtgccactgcattccaacctggcaacagagtgagactccatgtcaaaaaacaacaacaaaaaacactccttggaaaaagtataggtacattctatataggattagtagactgtcagaatcacttgaagatgttccgaaagcatgacatatcaacaaaggacatgtgagtctagaatggtgatccctaggacaggccatattactgcatgcaaagcaagtctttgttaaccttatgacttgctcaggaagcaaagtgtttcatgtcctaataggatagtagtattttctgttatgttacattttaggaaattaggagttttgcattgtcttgtaagaaggtattttaaaaattttcaatgaaaataatgagaaataggtttccagtggttttatgcttttggggaagaggttactgatgtttagcaaaagatgcttatatattcttaatagaacaaacctgagaattagttcttaaagagttaaggcccataaaagaaactgtaagtgttggtactcttgtagctgggccacagatcagatccttagtatgataaaatttggtatttttgtgcttcaatttttggagaccattcaatgatcacttacattttatattgtctttcattgtgaaacatatattatagcagaggtgggagtcattaaaaattctacatgttgtacactacatgtataagggtatatttggcrcaatggaggtaggattgtctgtgtgcctctaaaattaacctctcaagtagttaatctgatgatgacaagtatgtcactttattgataaaagggagaattaagactattctcagtattatgttggtcagtacacaaaatatatcatttgtttttacctgtgaaatgaaatatctttcatcctattagccagaagggagaaagccttggcctgaaaataacactyatctcaaaaagttgggaaatgtggtccaactctgtgcccaggaaaagaggaaatagattttgatgactacatagtctctgcactgcttgccagctcataagtttacttctttgcactgtttgttttcattgctcaaaaactattttctgtcactctatgagatttagtctaacctgattcctggctgtggaaagcagtttctacttaagagccgatgagaaatggtatattcttctcaatcactcacagaatgactaccctggaacaaactaggaagacccaaaatgaaccagtttgattttaatacatacatagatgctgaaggagcctttttttaagaccttgccttcttagtctttggagaacagagtactgaaacaagaaaactcacagattagtagtatttctgtgtgttctacagtgaggttttaagagctgtattatgattaatcagtacatgacatattggttcatatttataattaaagctatacattaatagatatcttgattataaagaaagtttaaactcatgatcttattaagagttatacattgttgaaagaatgtaaaagcatgggtgaggtcattggtataggtaggtagttcattgaaaaaaataggtaagcattaaattttgtttgctgaatctaagtattagatactttaagagttgtatatyataaatgatattgagcctagaatgtttggctgttttacttttagaactttttgcaacagagtaaacatacatattatgaaaataaatgttctcttttttcctctgattttctagatgtgacttacytaacagaagagaaggtatatgaaattcttgaattatgtagagaaagagaggattattcccctttaatccgtgttattggaagagttttttctagtgctgaggcwttggtacagagcttccggaaagttaaacaacacaccaaggaagaactgaaatctcttcaagcaaaagatgaagacaaagatkaagatgaaaaggaaaaagctgcatgttctgctgctgctatggaagaagactcagaagcatcttcctcaaggataggtgatagctcacagggagacaacaatttgcaaaaattaggccctgatgatgtgtctgtggatattgatgccattagaagggtctacaccagattgctctctaatgaaaaaattgaaaytgcctttctcaatgcacttgtatatttgtcacctaacgtggaatgtgacttgacgtatcacaatgtatactctcgagatcctaattatctgaatttgttcattatmgkaatggagaayagaaatctccacagtcctgaatatctggaaatggctttgccattattttgcaaagcgatgagcaagctaccccttgcagcccaaggaaaactgatcagactgtrgtctaaatacaatgcagaccagattcggagaatgatggagacatttcagcaacttattacttataaagtcataagcaatgaatttaacagtcgaaatctagtgaatgatgatgatgccattgttgctgcttcgaagtgcttgaaaatggtttactatgcaaatgtagtgggaggggaagtggacacaaatcacaatgaagaagatgatgaagagcccatccctgagtccagcgagctgacacttcaggaacttttgggagaagaaagaagaaacaagaaaggtcctcgagtggaccccctggaaactgaacttggtgttaaaaccctggattgtygaaaaccacttatcccttttgaagagtttattaatgaaccactgaatgaggttctagaaatggataaagattatacttttttcaaagtagaaacagagaacaaattctcttttatgacatgtccctttatattgaatgctgtcacaaagaatttgggattatattatgacaatagaattcgcatgtacagtgaacgaagaatcactgttctctacagcttagttcaaggacagcagttgaatccatatttgagactcaaagttagacgtgaccatatcatagatgatgcacttgtccgggtaagttgggctgctagattaaaaacctaataatggggatatcatgatacagttcagtgaattcattttaaaagtgactgaaaaaaatgataccatatagcataggaacacatggacatttctgatcttatataagtattatacttttgttgttcctgtgcaagtttatagatgtgttctacaaagtatcggttgtattatataatggtcatgctatctttgaaaaagaatgggttttctaaatcttgaaaactaaatccaaagtttctttcattcagaagagaatagagtgttggacaaagaccagaacaagagaaatgtggagatacccaataataagtgtggatgtgcagtcttgaactgggagtaatggtacagtaaaaccataccataaaattataggtagtgtccaaaaaattccatcgtgtaaaattcagagttgcattattgtggacttgatgaagtgaccatggcagatcagtgcctgttgccagtaagagttgagtcctgctgggccacttagaatatccctgtgtggacggcactgcctggctgtggtagtttcttcccacttaaaaattcatagagacaactctgggtcttggaacttctggaaaacagcagctattccaaaaatctggggattagtggtgcctgtaacatcaagtccagggagattgagcagggaartactggaaactcaggtactcatcctaacttcctggttttccagatggggttgccatttgttccttttctttcctccacaagataattttagtgtatctgtttaagaatataagagtggccagaagacagaaagcagtcgtcagtcacatttcaccaaaatttacatttgtctcaggtgcattatcgcagagctttattgtatttctagtattagctatccctgtcattgctgctacttttttatcatcttcaagtaaaatttaatgtcaacaaaaattaaggtagttaataatactatagtatactagtaaagttgtctgacacagacaactaggaaatgtgatttttactttaaaatgtattttagttttagaatgtctaaattttagttttagaattgtctaaattcgagaattcataaagctgtagcccggtggaaaaagttatttgacatctcagaaattaaaaattgcagagattttgtgtgktttttttttttttgttactggtttgttttttttttttaatgtcagatatgtttatagtgttggagaaagattctgcattatttaagcaactcaggtggttttctagcagagacaaaagggggctttaactgcctgaagtcattattattgcttgctttctggtacmctttttatttcacttacatagttttgagacacatgaataattaatacacttaatgactgatcataaggcagccagcaccttactttacatagtttagcagaatgatagggtattttataagaatgtgagtgatgttttatgaaaggtatgttgaggtctgtctatgactatccattgttggagcagaactgcaaatgccaaagctacatactttatgtttggcttcttgaggtgagatcccttcagctgtcttcatcaaaagctatgtctagcctttaaaaggcaatgaaattacactgtaagaatcattccagggttcaaaaaattgtctaccttccttatctgtctttcgctcagaagtctactcagtcttattttcctcagtcccccatttttttctctagtaaagcaagactaaaaacaaaagtttaagtacttggtrtatactttattctatattttaaattctattctagaattttaaggaaacaactgcttttaaagccttaggtgttagtgtaaaattaactgtgagctctttaattatggtaacttgtttttagcaagttctgcttaattatatcaaaattagataatatagtgtggcctatcataaatcaggattcactagatagtatatgtacttgaatattgccagcccacaaaagcagttcacttcagaaatcatgtgtgttaggcagtttaataaactgtgaaaatagaaagagatgatgcttacagagaagcttccttaggggctctgaatgctcacactaagcagattttactcttaactttctttctcccttgctttttcttccttttcttttttttaaaaaaataacagaatgtgaaaagactagaaaaaccagcatcgaaataggtcttataagtaaaattgataacctgtgtaattttttgaagtaagtattcacagcaggtgatgattatgataaagccacatattttagtaacacatagtagaagttctataatagaaagtggtttaagattattctctcatatgaaagctcaaaagtgatgaatttttcaagatcttatttcccaaggatctctgctttttaagcctcattcttatatatcacagtgaacaaactagtggccacttttttatgacttgctaattttggaattgtatagcagggttgggtggaaaagaagaaatgagaaactttgtggtaagcttaatattgataaataaaattatgggatcctaggctttaagagctaaaagaaaccttagagttatccactccttagtttagaaatcaagcccagaaaatagtgacttcatatatgagactcttgtatgttttctgttgaggagtggtaacttgaattaataattgtggatttttttwaaaaagaaaaatatattcattgcttttatatattgtgaaattcaaaccagactagcagcttttttcctgaggtttttagagaaattgtctttgatgacaagagaagaattcatgttgatagtattttcactaatctctgattgtaggaaacactatcattttattactgctaagacagaaaaataccagcaattcattgtaagatgctatcatttgtatggtgtaatctgatttcagagataatgtgaaaaaagtgaattttagaatcaatagaatataagttgtctcttcacaaataccttagaactgcttaagaacacccccaccctacccgtttaacttactgccatagttcccctaggacttattttcagtattttttcgttattgttccttagaaaacagtacagtgataaacatgagcttagacttcacctttcatttgaatgacattcctaatgtgatgaggtttttacaaatatgtaaaaccatatttacaaatttacatttttaatataaatatgtaatttaatttaatatgtaaattaatttaatttaaatatgtaaatatttacatatttacaaatatgcaaatatttacatatttacaaatatgtaaatatttacatatttacaaatatgtaaatatttacatatttacaaatatgtaaatatacccatttgtgtgttcttttacaagtagataatttctcatttttcttagatgaagcacttccaatgatagtatgtattaagattttttaaattacttcttaaaggagaagatagaggttataagtttatggaagaatatagtattgccatcatgaggtccctcaaactgccttcacatctgaatgggaaaattgtttaaaaaaaawaaataaataaataaataaaatccagggccctaacctctagaggtttagattagaagctgtattgtagagcctatgaatctgaacttctggtaatactccacaaatattttgataaagccagactccaatatttgggaagatggcctttggttcagctcaggtgggggtgtgtgtgcatgtgtgtttatgtgtgtatgtgtgcatatatagagagaaagagaaaggccattttgatatacaagtatgtttatgtgttttggaaactcagatttttaagaggatcatggggacagcaagcttggaatagaggatgatgatgatgtgaaacttggttccaattagtcagggagttctagcatttcacataaatatctaaaaaccaaaaggaatggctgagatgtggaattgaatagggaagttcaaaaataggaattagcacagataaaggtgattggcacagataaaaagccccactaccaggaggttctgcaaaatcccctctaaaagtcactggccctttttatctggtttctaatagcctagtctaacccagcttccagcattttcagctcccagcttccagcattggtgaacactcttactagtgaaacatgaacgtaattcttttatttattcattgactcacagagctttaaaaatgagattattctgtgctgcactaggtatgtttaattttgtcttacacatacactatattgtggttaacatgtaatttccattgttctttcttgtgatttattctaattgaaatcaaaaatgaaaccaagaaatatgcttggtttatgccctcaaagtaatttctcagaaactgaatgagagaatgaagcctatatatacatagatcctcagcattatataataatttaagacaatgaaacatcaaacttagtattacatgtgaggaaaatgaaatctaaaagagattccagcctacataaattaatggcagaattggaaatagaagtcaggattccaggtctcatggacgaacgtgattatgtgatttggtgttacccaaacatttaaactacatttgagatataacagacttttcttcatgtgtttatcgtgaacatgaaaaaattaatttggataatctggaaatctcaagcaatagtttaagcctcaagttgactgaagtagttgaagctagcctttctttctttttcctctttttttttttttttttttagacggagtcttgctctgtcacccaggctggagtgcagtggcgcaatcttggctcactgcaagccccgcctcccaggttcatgccattctcctgcctcagcctcccgagtagctgggactacaggcgcctgccaccatgcccagctaatttttttgtatttttagtagagatggggttcaccgtgttagccaggatggtctcaatctcctgacctcgtgatccgcccgcctcggcctcccagagtgccgggattacaggcatgagccaccacgcccggccttgaagctagcctttcttagaaatcccaggcattcttaagtattagaggtctcttttatctgattattgcttctacttaaatattcatggtattaaggaatttttttaaaaaattatgaattgatttgatgtaatagctcagaaaactataagattttaagtgataaggttttccttttgattcctgtaagtctagtaatatcatattttgatattaagatgtcatcctgctaggtattctgcaaatgctttgatatcaggtcagattttttttttaaaaaatgaactccctaggatttcatcatcatggccaattaaaaagttcagaaattaaaaatcattttatccagcaattgatgaaatcaagagtcttaaagaagaggaagttacgcagtgaagaggtagatatgattatatccaggatatttttgtttatttttccccagtaatctctgtctgttgctagtctccatgttaaataaatacaacatacactgtacttttaaatatacctaaaaattggcctggcgcggtggctcacacctgtaatcccagcactttgggaggccaaggcgggcagatcacaaggtcaggagaccgaaaccatcctggctaacacagtgaaaccccatctctactaaaaaatacaaaaaaaaatagccaggcgcggtggcaggcgcctgtagtcccagctactcgggaggctgaggcaggagaatggcatgaacctgggaggcggggcttgcagtgcgccaagattgcgccactgcactccagcctgggcgacagagcgagactccgtctcaaaaaaaaaaaaaaaacaaacaaaaaaaaccctaaaaatccacgtgtgtattgtaaataaattcaggcatgcatgcacgttctccttttcagaatgtttagacatagtcctccaaatttcaaatatcctaatgcatttaaaacaacttctgacttaaaaaatacagttttatggtgaggtttgggtttaaacaacaacatacaattttaaataatatagctattatgtaaagaatacacctttacagtttatttgttaaatcttttttaaattgaccgaacaattgatggaggttatttttaagaaaaagaattatcagtacagctgtttatgcaataatggcctttatcaaaatggttattgctaaattttatgtgttaataatttaaaataaaatagttttaaaggctatttatgtattctgtttttactattttatttattttaatttttgagacagggtcttaactctgtcacccaggcctggagtacagtggcacgatctctactgactgcagccttgacctcccacctcagcctcccaagtagctgggatgacaggygcatgccaccaccccccactattttttatttatttatttatttatttatttatttatttatttatttatttattagttttttgtagaaacaaggtttcatcatgttgcccaggctgatctcaaactgctgggctcaggcaatctgcctgcattggcctcccaaagtggtgggattacaggtgtgagccacggcgcccagcctttattcttaagtggtacagtattttatgaaatcacttatgtgtaccagaatggtaatctaaaataggtaataacaaaatttttgcctacagaattcagttaccaactacttttcaaattattctttttacatatttatatttgaacacattctgactctgaaaaatgtatttgttgtaaaaaatggaaaaatatggaaaagaataaggaaaataaaaatcactcataatcctaaaaaaaaaatttttggtcgtcattgaagagagtgagtaaagcatagtagttaagagcttgtttcctggattagtatctctgttccacaacttactgtgacttactgtgacttgaagttatttcacctttcagtatcttggggtccttatctgtaaagtggagttaatgtttccttcctcataagggtgttgtgaagattaaattagttgctatgtgtgaaatgctrcaaaagtgctatatattattgttgctgtattcatggaatatttttgttctataatgctatggtaggttttcagaaaatattttagaaccaataaaataacagcaacaacagctagtacttttaagcactaactttatgcagggaattaatctaagcagttcatacattaatttattactatattattatggttattttacagatgaaataagagaggtaaagttgtatgtttgcatttacaatagaacatattgcattgcattacattcttttggcaccaaggtggggagcatagaatagagatcagtggaagtggacagacatgtaatattttatggagaataaagataaatttgcttcagttatcatttgacatgtcttaggtagagctaagactagatagaacacagggcctctcaatcctgtagaaattcaccaccacatcctttaaaaggttttacattgataaggagtcagctctcatctatgaatgttagtggggaaaagctgtagaatgcacagtctaaataccagataaccttttttttccccactttggaatacattatatttgataaaagcaagtatacctttggatgtaaaggtaaatataaacactgacttacatctttaacacctagccagttgggaactggcataaggaaactcagaatggattacatggcaatatggaatgttggcctggtcccacatttgagctaagatgttaattctaattttagtctcctcagaattctgtatactccgtagcttgaaacaggtttccaactgaaactatttttttccccaaggttattttcacatctacatttgtttgactctagatcttggaactagtctatatcaagttcctttggggacacaaaattgcaaatctgttgttcagagagcaaaactattttaaaaggtaacactcgttctcatatattcttaataagccttcacaacttacagtatgttgaggaaactgaggcttaattgaatcgcgtgctaaagtttaaaggttaaaagttatggtaagtgagagttgggactagtaaggtgaattctgactgactcttggtctttccataacaaaacattgtctaaaagtaaactgtgtggcctaaaaatgattttgtaaatattagagatcggtgttgaacaacaacagacattatttaaagctaaagactaaattcacagaataggaccctaaagttgaagatacccagaagataatttcagctagttttgtcaaactctttgactgcaatccctagtattttacatagcatcccagtacatgcttatccatctgtacatctaattgaaacaaaagtttcacaaaacagtaggttccattactatgtggaatgcattctgattttcccattgctgattgcaaaccactaaatggattagactacccactaatgagttgcaggtgacaagtttgaaaaaacaatgctctcgggcaacctgacctgatgcgttaatttatgagattttattttttgtagacagactagattgtccaaatgagtattattactttaactactatagtgctgtgttacagttgtttcagtgattattgcatttttcaaaaccatttttaaaattctgtttgaaatagttggaataacctgaaaacatttaatatcctgttttggtaaattttcatctccaagattaaatttttttaaccagccaacagatgtttgaaggcaagttaggagatatgatggatactggatacagtatccatccatgtactagatacagtatccatccatgtactggatacagtcatactgttagcaaattttagatacataaagtaaaacaaacaaaatgcagtataaamagttaatattggaatctagtgttgattttatgattaatctcaatgaggttactgtatattcataattctataggtacacaaraatatttggtaaaagatttatagttgagaaaatgctagacactaaagtttgttaacttacaatttaagaataagggctgggtgcagttgctcacgcctgtaatcccagcactttgagaggctgaggtgggcggatcatgaggtcaggagttcaagaccatcctggcaaacgtagtgaaaccccatctctactaaaaataaaaaatttagccaggcgtagtggcgcctgcctgtaatcccagctactcaggaggctgaggcaggagaattgcttgaacccaggaggcggaggttgcagtgagctgagatcgcgccactgcactccagcctaggcgacagagtgagatttcatgtcaaaaaaaaaaaaaaaagagtaaggacatgagtaaggttatgtctcacctgtttttaaggaaatgtggatataagatgggttctagtccattaaaaggtggtaatttatactaagtcttaytgtgagagaccataaactgctttagtattcagtgtatttttcttaattgaaatattttacttatgacttagtagatactaagacttaacccttgagtttctattctaataaaggactactaatgaacaattttgaggttagacctctactccattgtttttgctgaaatgatttagctgcttttccatgtcchgtgtagtccagacttaacacacaagtaataaaatcttaattaattgtatgttaatttcataacaaatcagtaaagttagctttttactatgctagtgtctgttttgtgtctgtctttttgattatctttaagactgaatctttgtcttcactggctttttatcagtttgctttctgtttccatttacatacaaaaagtcaaaaatttgtatttgtttcctaatcctactccttgtttttattttgtttttttcctgatactagcaatcatcttcttttcatgtttatcttttcaatcactagctagagatgatcgctatggaaaatcctgcagacttgaagaagcagttgtakgtggaatttgaaggagaacaaggagttgatgagggaggtgtttccaaagaattttttcagctggttgtggaggaaatcttcaatccagatattggtaaatacattagtaatgtgattatggtgtcgtatcatcttttgagttagttatttgtttatcttactttgtaaatattttcagctatgaagagcascaaaagaaggatttggtatggattacccagaatcacacatcatgactgaatttgtaggttttaggaactgatttgtatcactaatttattcaaattcttttatttcttasaaggaatattctaatgaaggaaattatctctttggtaaactgaattgaaagcactttagaatggtatattggaacagttggagggatttctttgctttttgttgtctaaaaccatcatcaaactcacggttttcctgacctgtgaacttcaaagaacaatggtttgaagagtattgagagactgtctcacaagtatgtcatgctcaaagttcagaaacactagctgatatcacattaattaggtttatttgctataagatttcttggggcttaatataggtagtgtttcccccaaactttttgaactccagaactctttttctgccctaacagaagagttgttattgaacacagtttgggaaaggctgatgggatttggaaatttgaaagtgaaggatcagaattttagttttttcccttttgtgataaagtagaacagggaaaagatgcagtcttttgggtagtctacttaacttcataattctgaactggttcagtttctactgtaaatataaccacttagtaactgagcttgcttacgtttaaaattgagtacatgacaattacaggaaaaggtttccactgaaggtaccatcagaattgtgaggagtgtgcatagaataatgtatgtcatttcccttcagctttgagatttgagctgttatagcctgttgattctaattgagttgacctttctgttactgttcttagtcacacacacacacacacacacacacacacacacacacacacacamgcatcccttatctataatctagctagtgttttattaataactaaaaagctatgccatttgtatgtagtttgttctaagtaaatcagagatacataagacgacgccctttttgagatagaaaattataaacttcataaagttcttaaatttggtaaaccttagctctagcttttgatgtatctagaaatgttaaaccttagctataaagcatacttgcattatatgcagaaatacttgtaagaaaaaacatagattaagcagttccagtaagataactgaagtgatggcagtagaagtatcaaaaaggagtattttaccaggaggttatggtgcttttctccctggaacatgagaaaatgtgcctaaaatggaacttcagagttatattctgattaacttatagcttgttgctcttggttccaaggaagggcatttgtgacattttattaaattcattaattttttagacacaccattgtcagcttgaacaaatttattaattgtaattatttgtcagctgttcttgatcctgttaataccatacttataactaaaagcatttccatggatgttgtaacttggcctgtaaaaaaaatgtttagatagaaaccatgaaactcaaatatgaattgtttaattttcaaaccattttgcattcagaaaatgtcctaagcttaattcatactcctagtgatcaaggaaacatgttaaagctccttatttttaaacttaaagtgacaatgacattttcaaagattttaaaattcttataaacaggttaaaatacttayatactgtataatttgatttctratttctaagctctacttttctattggaaattacagatttttttcagacttaattcttaagatgttttcattgtttcacagtagcaactaaacatgtagtaaaatgatttaaattcaattaaaatttttttccttagtcatttaaaagggaagaaatcaatttttagtagtactcattccaaagattccaattttccttttttttartcttttattttttggtggagggaggcaggatctggctctgaggcccaggctggagtgtagtggttctgtctcggctcactgcaacctccacctcccaggctgaagactcaaaccatccccatgcatcaccctctcaagtagctgagactataggcacatgctaccacacccagcttattttttgtgtttttgtagagatggggtttctccatcttgcccaggctggtcttgaactcctgagctcaagtgatctgcctgcctcagcctccccaaagtgctgggattacaggtgtgaactaccacaccgggccccaattttccaatgagtgatataaaaaaggcctccacgcaggcgcctgtagtcccaactactccggaggctgaggccagagaatggcatgaacccgggaggcggagcttgcactaagctgagtgctgctgcactccagcttgggcgacagagcgagaccgtctcaaaaaaaaaaaaaaaaaaaaaagcctccatgattggggcttgcatagtgaagaccatgtgaaattgaaagactacgaaactacttttcttttacgtattggcccataattaacatgtgtattgaatagctttgtttatctaagttcatcagatttatccaggtttatgtatttcagatcatctgattttattaggaaaatgctagaaaaatttcatggcaccattgtctaattttgaaaaaacgaacctttctttactgtgattaaaaattgttttttaggccaggtgtggtggctcacgcctgtaatcccagcactttgggaggctgaggctggcagatcacgaggtcaagaggttgagaccatcctggcaaacatggtgaaaccccttctctactaaaaatacaaaaattagctggcgtggtggtgcacacctgtagtcctagctactcaggaggctgaggcaggagaattgtttgaacctaggaggcagaggttgcagtgagctgagatcgtgccactccagcccaccctgggtaacagagcgagactccatctcaaggaaaaaaatgaaaaattgttttcaaaaatagtacgtgtggtacagatataagtaattatatttttataaatgaaacactttggaaatgtagccattttttgtttttttatgtttatttttcagctatgggtggataaagcatgaatataacttttcttatgtgttagtagaaaattagaaagcttgaatttaattaacgtatttttctacccgatgccaccaaattacttactactttattcctttggcttcataaaattacatatcaccattcaccccaatttatagcagatatatgtggacattgttttctcaagtgctaatataatagaaatcaatgttgcatgcctaattacatatattttaaatgttttatatgcataattattttaagtttatatttgtattaktcatcagtccttaataaaatacaaaagtaatgtatttttaaaaatcatttcttataggtatgttcacatacgatgartctacaaaattgttttggtttaatccatcttcttttgaaactgagggtcagtttactctgattggcatagtactgggtctggctatttacaataactgtatactggatgtacattttcccatggttgtctacaggaagctaatggggaaaaaaggaacttttcgtgacttgggagactctcacccagtaagttctttgtcatttttttaattcagtctcttagattttatttaaatgcaaaaatttaatttatgtcaaaattttaaagtttttgtttagaatctttgttgatactcttatcaataagataaaaatgttttaatctgaccgaagtaccagaaacacttaaaaactcaaagggggacatttttatatattgctgtcagcacgaagcttttgtaagattgatttcatagagaagtgtttctaaacattttgtttgtgttttagtgaaatcttaagagataggtaaaaatcagagtagccctggctaagggtcttggtagttacaacgagtgtgcctgctcctaccacccccaccccyaccttgagacaccacagaatttctcatagagcacagtgtgaattctattgctaaattggtggtatggggtttctcagcagagaatgggacatcacagtgactgacaatctttcttttataggttggaaactatttgggggactggagggatactgtctacactttttacaatttttattgataagatttttgttgtcttctaagaagagtgatataaattatttgttgtattttgtagttctatggtggcctcaatttaccatttctggttgctaggttctatatcagagtttaaaagatttattggagtatgaagggaatgtggaagatgacatgatgatcactttccagatatcacagacagatctttttggtaacccaatgatgtatgatctaaaggaaaatggtgataaaattccaattacaaatgaaaacaggaaggtaataaatgtttttatgtcacattttgtctcttcattaacactttcaaagcatgtatgcttataatttttaaagaagtatctaatatagtctgtacaaaaaaaaaacaagtaactaagtttatgtaaatgctagagtccacttttctaaatcttggatataagttggtatgaaagcacacagttgggcactaaagccccttttagagaaagaggacatgaagcaggagatagttaatagctaagtgtggttgtagtataaagcaagaagcagggtgtttcttgtattaagctgtaagcaggaacctcatgattaaggtctttatcacagaacaaataaaaattacatttaatttacacatgtatatcctgtttgtgataaaaatacatttctgaaaagtatwctttacgtcagatttgggtttctattgactaaaatgtgttcatcgggaatgggaataacccagaacataacaagcaaaaaattatgacaaatatatagtatacctttaagaaacatgtttatattgatataattttttgattaaatattatacacactaagggtacaaagcacattttccttttatgatttgatacagtagtttatgtgtcagtcagtacttccacatttttgctgaactggatacagtaggcagcttaccaaatattctatggtagaaaacttgggacttcctggtttgcttaaatcaaatayattgtactctcttaaaacggttggcatttataaatagatggatacatggtttaaatgtgtctgtttacatacctagttgagagaacctaaagaattttctgcgtctccagcatttatattcagttctgtttaatacattatcgaaattgacatttataagtatgacagttttgtgtatatggccttttcatagcttaatattggctgtaacagagaattgtgaaattgtaagaagtagttttctttgtaggtgtaaaattgaatttttaagaatattcttgacagttttatgtatatggccttttcatagcttaatattggctataacagagaattgtgaaattgttaagaagtaggtgtaaaattgaatttttaagaatattcttgaatgtttttttcttggaaaaattaaaaagctatgcagcccaataacttgtgttttgtttgcatagcatattataagaagttcttgtgattaatgttttctacaggaatttgtcaatctttattctgactacattctcaataaatcagtagaaaaacagttcaaggcttttcggagaggttttcatatggtgaccaatgaatctcccttaaagtacttattcagaccagaagaaattgaattgcttatatgtggaagccgggtaagaaagcaggtgtctgcaaaaagtcatgtatcgatttattgtttgtaatgatacagtagtatagcagataactaagacatattttcttgaatttgcagaatctagatttccaagcactagaagaaactacagaatatgacggtggctataccagggactctgttctgattaggtgaggtacttagttcttcagaggaagatttgattcaccaaaggggtgtgtgattttgcttcagacctttatctctaggtactaattcccaaataagcaaactcacaaattgtcatctatatacttagatttgtatttgtaatataatcaccatttttcagagctaatcttgtgatttatttcatgaatgaagtgttgttatatataagtctcatgtaatctcctgcatttggcgtatggattatctagtattcctcactggttagagtatgcttactgctggttagaagataattaaaataaggctaccatgtctgcaatttttcctttcttttgaactctgcatttgtgaactgttacatggcttcccaggatcaagcactttttgagtgaaatggtagtcttttatttaattcttaagataatatgtccagatacatactagtatttccattttacaccytaaaaaactaagccctgaattctcacagaaagatgtagaggttcccagttctatctgcttttaagcaaatgcccttactactctactgtctacttctgtgtactacatcatccaattctgaaagacataggcttccccatcccctgctaagactggttcaagtggcagctactgatggattgcagtgagaaggcatgcaaacacgtaccttcctggaagttgtctccaaaggctattgctctaagactcaagtatataaacactagaatgaatatcaactctatctagcaataaatgttatttttatattacagttgacccttgaacaacacagctgtgaacttcatgggccctctgacatgcagattttttttctcaactaagagcagattcagtattggtgggactcagaacctgcatatacagagggctgactttcatacatgccagtttcacagggccaactgcagaacttgagcgtgcatggattttggtatacacacgtggtcctggaaccaatccctgtcacatataccaagggatggctgtatgttactttatattcatttgttctgttattttataaggttgttcgtcgtggtatgtgggaattcaccagtatttcttctttctggtgcaccgttggtcatttctggcagcagtggtgaatgtatttactcttagcaacctctgtgctgctacctgttctgagtttcaaaggtgattcattaaagggttgggataacatggtgataggaaaaacccccctcatcagtcacaaggagtataacagcaatatctctgtaatatgattgatcatagatataatttctagtaggaaaaaaagtcatatcttgatgcatctctgagaatagttgaacatatcttgtgctattctttatagagaaattatctttgaaattaaagtcttaattttacttctagctttttataacaacataatccctacttggtatgtatcttaagatcatttttaaatgtatgatttgaagggcaaactagtgttatgtgaaaaatgacagataaagtagcttccaactcatcctcaagagttgatgatattctaaaccttttctaactaaattcagcttcttaattttctcaatataaatatgatgaaaatattaattcattaaatagtctacaagtattcggtagttgaagacttaaagtagtgcttgtaataacagaagagaaaaaagacattacaggcgtatctcactttattgcactttgcagatactgagtttttttggtggcaaccctgcatcaagcaggtctaccagcaccatttttccaacaaaatgtgctcacttcattagcatttttagcaatgattttaaattaagataatgtacttatttttagacaatgctgttacacacttgactacagtataatgtaaacgtaacttttataagcactgggaaacaaaaaaatttgtgtgactcactttactgccataatcactttatttgccatggtctgaaactgaaccggcagtatctctggggtatgcctgtatagatattttggttggtatttatttattgtatgcagaattcataaaaataaaaactgcgaggctgtttaatacatttcaactaaaagttgccagcatcattaatatgtaaaccactagaaataagattttgttaattttttgtttgtttgtttaaacagtcttgctctgtcactgaggctggagtgcagtggcgcagtctcagttcactgcaacctccgcttcctgggttcaagtgattctcctgcctcagcctyctgagtagctggggttacaggtgcacaccactacacctggctaatgtttgtatttttagtagagataagggttttgccatgttggccaggctggtctcaaactcctgacctctggtgatccgcccgcctcggcctcccaaagtgctgggattacaggcgtgagccaccatacctagcaaaatcaactctgaatctgaatcaaacctttgaaacaaaaattaccaatcaaaaaaacgtgcaatccctgctcctaactttgaaaaagtgacaaggaaggacatttggaaagatgtctctaagcagtcaacaagaaatgaaatcagggagagctttttcagcacctgaaaaaatacatgcaaaaacgcccgaggcgggcagatcaccggaagccaggagtttgagaccagcctggcaaacatgggggaaaccccgtctctactaaaaatacaaaaattagctgggtttggtggcaggcagctgtaatcccagctcctcgggaggctgaggcaggagaatcgcttgaacctgggaggcggaggttgcagtgagcctagatcgtgccactgcactccagcctgggcaacagagtgagattccatctcaaaaaaacgaaaaacagattcagagtttatttccttcccaaatacttcatagatgttggtttgtaggaataacttaaaagtctcactcgctttctgtcttttctagtaatttttatcrtggattctgattgcctagatctgctaattcattgagggttacaaaattgtgatactcgaattctttattcctccttcctttattacctgtaatacttcttaagaaaaactctttctcatcaactctatgactaccctaaattacagatccacatataggatctgtatacatgtatataaatatgtacatatcatatacgataatgcttaattctttcccattacttactaattttcaaaataatgtgattccctaactgctctctgaatgttatcaatgtggtggtaataatggtggtgtcgatgttgtgtggggtaaaatttgaatacagtgaaatacccagggcttaattgggttagtttttaaaaattacatttatgtaaccatatttcagtcaaggtgtagactatgtccatcagcacagagttcccatgttttcccttccagtgaatctccatcccccattagaacagacaataactgtcctaattactgtcactgtagcttacttttgtctgctctagaatttcttatgaatggaatcttatgtacttgtactgcatgaagactctttagattcatccatgttattgcattgatttatagtgccttttaaaaaattatagagtagtgttgcattatatgaatacgcaaagtgttttttttttacctgttggtggacagttggattgtttccagtttgggactattgtgaataaagctgtgtagtcttattgtggaaatgttttatttctcctgggcaaacatgtaggagtggagtttccaaagcatatagcaggtgcatatttaactaaaagtgtcttttcctcatttttaatattggatttttgtatttctattgactatagatattttcttaaaatatagyagtatgtcttatccttagttttgcttttttttggtttcagttatctktggtcagcagtggtccaaaaatatttattaagtagaaaattccatgaataattcagggtttttgatgtatgtgtgtgttggcgggtgcagggcagggagagttggttggttggttcgttggtttttttttttttaaagagacaaagtctctgtcatccaggctggagtgcagtagcatgactacagattgttataaactgaaactcctgggctcatgcaatcttcttacctcagtcctctgagtatctgggctcatgcaatcttcttacgtcagccctctgagtagctggtactacaggtgtgcagctaatttttagttggttatttttttgtagaaacagggtctcactatgttgcccaggctggtttcaaacccctggactctagcaattcttccacttcagccttccaaagtgctgggattacaggcgtgagccactgcacccagccaacaactcttaagttttaaattacatgctattctgagtaacatggtgaaatctcccacctttccacccagggcatgaattatccctttttccagtatatcgttgttgtctagactacccaccacttttagtctactggttatcagatcgactgttgcagtatcacatgcttgtgttcaagtaacccttattttacttaataatggccctaaagcacaagagcagtgatgttggaaattcgaatatatatgccaaagagaagctggaaagtgcttcctttaaggaaagaatttaaaaatcatatgttgaggttgctaaaatctatggtaaaaatgagtattgtatctatgaaattgtgaagaaggaaaaataaatcatgcatagtatatacagggttcagtactatttgcaatttcagacatcactggaggtcttggaacgtattccccatgggtaagtggggaatactgtatattctatataaaaggcccatttctgataagtagtttatgattattttctccaagttttcattttcttaagtgtcttctggtgagcagaaattattcattttttgaggtctaatttattttttcttttatggttttttatgtccttttatatctttgcctagcccaaagccacaaatatcttatgttttcttctaattgtgtaatataggtttaacttttatgtgtaaatctgtgatccaccaccaataaaattttgtgatgctgttagacagtggatgtcattcattttctaaatagttttatttatttgttccagtaccatttgttaaagagacttttctttccccattgaattgcctttgcacctttgttgaaaatcaatctgtgtgtgagccgtgtttctggattctccattctgttctattaatttgttttgtccttttgccaaaatgacactgttatggttactgcagcttcaaatcagatgctgtgagtcccacaactttttcattaggttgctttgacttttatttgcatataaatattagaatcagttaatttttacaaacaaaagggcaaagcctgcagagattttgatttgggttgccttgactggggcaggtcaatttggagagaattcacattttaacaatatattcttccaatccttgaacaccgtacgtctctccatttatttagatgtttgttagtttatctcagcactgttttatagtttttaatgttgaaatcatgtactctttggttaggaataaacttaaaatatgtttctaatgctattagtggtattttttaaatactgcttttcacttgtttattactatcttgaaataaaatcgatttttatatattgatcttatatcctataacctttctaaattgacttattctagtagttatttagtagatttcatagggttttctagtaaacagctatgtcatctacaaatcaagacaggtttctttctttccaatgtttatgttatttattactgttcctctattgcactggctagaacctttggtagaaggtattcttactttattcctcattttattgagagagactataatatttaccattaactgtgatgttacttgtaaacaaaaagtttgtatttctctgggattaaaaaccaagagtccatttggttttttactgttgagttttaagggttccttatgtattttctaggtatgttcttccttcattgaattgtttttttcacatacgttaaaaatcacttgagaatatttatataggtctgcttctgagatttatctgtttatcaggttttgtttcatttattttgaggctctatcatttggttcatacccatttagaattactatgtcttggtgattggtcctttatcattatataagttttttctgttttgcgattttctttgctctgaatctgatatgagtgtaaccatttgtttttttttaaattaatgtttgcatgatctgtcttttactatcattttactttcatcctgtgttgctgaatttgaaacgaatctcttgtaaacagcatatagttgtcattttaataaaaactgttagtctctgccttttaatttttttatttagaccatttatatttaaggtaattattgatatgttagggagaggtctgccattttattatttgttttctgtttctgtcttctgtttatggttatttatttattgccttccatgattacttgaacattttttaagatttttaagacccttgatttatttagtgtttgggttttgttttgtttgtttgtttgtttttgtttcgagacacagtctcgctctgttgcccaggctggagtgcagtggcacaatctcagctcactgcaacatcggcttcccaggttcaagcaatcctcccgcctcagcctcctgggtagctgggactacaggcacatgccaccacacctggctaatttttgtatttttattagagatgaggtttcaccatattggccaggctggtctcgaactcttgaccttgtgatctgtccacctcagcctcccaaagtgctggaattacaggcatgagccaccatgcctggccttctatgtgttttttatagttgttttcacggtcattgtgggtatcacattatagataatgtgacttaccaccattcactgccatcaataccattacatggaatgagatatggaaaccttaatttcagttgggtctctttccccacttttaaatagtattgttttgaggattaatgctattacagtttttgtatcagttatccaatatgacttatagaacttatcaagggagtgatgctctgttgtatgtacccatgtttctgctatttccattattttttccaagattccatcttttattacttccattagccagtcttcaaaggcagttctgctagtgagaaattmtttttgtttttctctttctgaagatgactttattttccctttattcccaaagaatagttttatttgtgctatttggggttcgctcagcttcttgaagctgtaagtttgtgtcttttgccaaacatggaaaattttcaaccattatttcttcaggtgttctttcagcgtcactcttttctccattctaggcctctaatgatacaaatgttgagtcatttgttactgttccacatggacctgaggcatggttcatttttcagtctattttctctcttttgttcagatttctctcctttgtcatcttcactctactgttgagcccatctaatgattatttttctcctattgtattttttaggtctataatttccatttgcttttttttccttgtawcttgtttccttgctgagattttctattgtttcgtttttgaaacagtagaacttgtaattgcttgtcaaatcatttctctgatggcagcattaagatccttgccagataatttcagcatcttactcatcccagtgttggcgttttctttccttcatgtaattttcctggttcttggtatgacagataatttttggattgtgtctcggacattttagttattatatcaggagactctgtactttttaaaaattttaacttcagtagtaacctgttaaggtatagcatgtaggtactagcatatatttgtgagctgtggttccagtgaccatttttcagaggctttatggtgctgttttggtttgttgcttttatctcagtccactggggctcgcactggttcctagtagtgctgcttgaggggccttctccaggctgagctgcgcagagtgtgtttgggtgagggaagaggacccccactagattttcgtgggctggagagtgcttcctgagccttgtgcctgttgtggcaggctcccccttgctggtgttcctggcagtgctcctgaccacattgtgtccctgggctgtggaayacttgcaggaaaggtgaacactgccaggaccaattatagcagaattcctcctgccagtacacagcagcactgtggctctggaccagcaaggagagtctcaagcatgggtttgtttctttttgattttaagatttttcttctgccttcaggttctggtattattgttctgttttattcacctttatgtttcttctagtttagttttagtttctttgtatttgatgggatttttttccttgcatttctaattactccttagttgtgtcatgtcttcctttttttcagttaccctcattcagaaatttcccatttctaatgatttgttattttttaaattctttttagctcagtttgaaatttgtttacagttttcatgttttatttgcatattgtttcatgtactttgattttctgtagggacaccattctcatgtatatgcacatactttttctctaataattacactgtttcactctgttctgttatttatttatttgtgtgtgtgtgtgtgtgtgtgtgagtgaaatgagtttctcatacttggacgagggagagatgggccaggataacttttttcgctttttagggacgaggagaagtctgtgtttttgtaaaatggtcaaaaatatgcccttgtgctttctgaaactgccttctttactcctctatcccacacatatatttgaacttttttttggtttttattactgacctggtccattyggaagttattcccagaagtttttcctcggtacaaggtttgtttctggtgggggtttggtattcgggtgttttaagggcccagagcttactacatcatgatccctttgtaatcatctgcaaattagatcctgtagaactttttaaaactttaagccctgttttcagattggcctgtgctttccagtgggttggcagtgttctcagggctgtcagaaacccagtcagttaccttgcatctgcttccttactaaccagtcttgtagttgtcagagctttgtttctgtccaattatatgcaatggttcatggttttgttgtagataatgtctctgggtctttggttttctcattcartttgctgtttttgtaggggaggttgggagggaataaaacaaaaaataataataatmataactatgtcgttgccatcatcatctttccagaacctgctacctgcccttcacctgattttcgtatttatcagtatcattaccttaatctgttatctcattggggattgcaaaatggctgtttggggaaaaaaaatttccatctgcttgtcctacatatatacctggcattcttttttctcatcattgggtgccatttgattaccttgaaaaacagttctacagaaaaggcatgataaaatagatttaaggtttttagagtaaggagttaatgtaataattttaatagtgacaatttaattttgttttttggttggtttttgctgcctttttgaatattacgaactaatgaatgtttttgtatttaatacgtttcacagtcattactctaaatgatattcaaattgcttagctatcgtgtgcttttaaaatgaccctattagattttgagatttctaactaatctcgaacattcattctcaggcctggaataagttatttttccaataaattgttggagaatggcatttagaagtcagattttagatgcaaagtatggcctttgcttttgaacgttactgcttgtaggccttatcagaggacagaactaggaaaataatcttcctagtgtatcctgagaatcatcccacattattgcagaggtgttttccattttgttttgtatgactgaatactgctcctttgtgtggatgcagcatagcttatcaatatttatgggcatcgaggttatttttaaccttttgctgttagtactaatgtcacagtgaatcctcttaatgttcatgcattattccgtacatatgtaaagtatcattaagataaattgttagaagtgggattgttgcatcaaatggtagatgcatgtgtaattttgctagatactgccaaatcctccttcacagaaaaataacattttgcattcccaccagcagtttacaacagtatctcttttcttaaaactttccaaacagaatgtgttgttaaatgtggatgtttacttatttgccaattgagaaatggtattttactatagttacaatttttgagcttacctcaattatgaatgataatggacattttttcttgtagagctgtttatagttttatatagtcttttgctcattttgctgctcagctggtcgttttcttcacttttagaaactttatatgttaaggagattagtcctttaacgctggtaaattcgcaaatattttttcccagtttgtcatttgtcttttaaccttgcttataggatttttttrccaaatgaaaggttttatgtttatgtagttagctattaatctttttcgttattatgctttgatatgcatttctttagttatgtttattttattcattttctttgttttttaattttctagagtctgtcctcagtagaaattttagtcatactgcttcttctttggtcaccttataataaaattagcctttatttccaaagttaccttgcatatttcttcagtattttttagtattcttatttttatttaagatgtgctcatttctttctgaatttgtatttctcatcactggtggtctgtcttgtctgctgctgcattctccttttgtgttgkaatgtggtgttactagtttcccattgtttatgactgaatttttctggtctacttttgtctaccggaaagttttgcttctcattcgccagactcttcccataataactttatttagacttccraattctgtttttcttgtttatgtttctataacagatgttacttttttctggacctgttattactagacctcatggtggagcagggaggaattgtgtggctttaggggtcttggttgaagggatccctcttctgttgctttagtaagggcagaatcaccactttctgatttttcagctccatgtagcttaatgaagactctttttcattagctgcttccacccctttacagccgcttaagggacacttctgcttttgaaggtaccccccttcctttcrtgcatggtgccttcctgagcctgccattgctggacccaagtacttttctgtagtccttcctttaaccaccctgttgccagtgctctaacctacmctcagtagtgctctgttgaggggcaggtggtggagggggtggggtctggccttgggtgatccctaatcagtatgattccgcacaagccactcttcgatgtagctcctgctggaccctgctcatttccccacttctttggtatttggagtttattgttctgtctcctagttttactctagacctaagtcataggttttttttttattttcccctttttgatccgggtagatttttagagatgtgagtaggatgtgatcgatacagccaccacttttatgtggaaacctggaagcttcttcgtgttttcttcagctttctaaatatatgcattcttgtttaattcaaaatgttaatgtaacacacataacacttataggaatagagatgcattttgttccctgttttcattgtataaaatttttaaaggtttcgtttaaaagtccaaagaaacagctccgtaataatatagccagactggtcattgtgaccactgctgatctgccacttcctgcagggtctgtctctgttcttcggtggtgctctttggtctacctccttaggtgtagctggttcagttaagcttcagagccctcctgcagtgtgaggaggctttattaccacccactgcagggcagcttttctgctatgttggagggttctgtgctacagcagacttgttttctcttgtcagcctccccaaaaggagtatcatgaactggggtcygattcctctcctccttacctgagagatgctcctgcaagtttcatgtccagttttctgttgttgtgtgtttcttttttgttttctcttgctgactggtggatttgtaaaggggcagggaagggaagtggcaagagattggagaaagccaagaattctaataaaacttttaagttatttcagataaatggtgttgcagcaccaaaaatgccagcattttggtaataaaaatagtatgttgggatattagaatatcaaaaggtagaaaattgtaattactggtttgggatgtgtgatgttctctgctaacattctggaattttttttttttttttttttgagatgaaatttttttttttttttgagatggctcaaaatgtttcccaggctagagtgcaatggtgtgatctcagctcattgcagcctccgcctcccatgttcaagcaattcttctgccttggcctcccaagtagctgagattacaggcatctgccaccacgcccggctaatttttgtattttagtagagacagggtttcaccacgttggtcaggctgatcttgaacccctgacctcaggtgatccactggcctcagcctcccaaagtgctgggattacaggcatgagccaccacacctggctctggaaagaactttctaaataactattaaaatgcattttatattatataagcaactaaaaatacttttaattttttttttaattttttaatcttaacattatttagctataggccaggcgcggtggctcatgcctgcaatcccagcactttgggaggccaaggtgggcggatcacgaggtcaggagatcgagacccatcctggctaacatggtgaaatcctgcctctactaaacgtacagaaaattagccaggcgtggtggcaggcacctatagtcccagccacttgggaggctgaggcaggacaatggcgcgaacccaggaggcggagcttgcaatgagccgagatcgcgccactgcactccagcctgagcgacagagcaagactctgtctcaaaaaaaaaaaaatttatttagctatgaactagtgtatatatgttttatagatgcctgattattcaaataaacttcaagattgcactttatgagcttgtatttcgttttttagaactcaaactaacataagtgtcattaaaacatagcttttattacatagattttaggaatgccacaggataaatcattctcttaaaataactgcaggtggcagaaatgtyagaataattctcctcctccatacacagcacatattacttgtttaaagtattctagttcatataaaaattgaacttttgtattactgctattaggtatgtagttgtttgcatttggggccagttggttggggcagggggtctttttttcttttgtccttaatctgtatcactttttcctcccaaagttgagttaaaggatgagtagaccaggagaataaaggagaaaggataaataaaatatatacccaaaggcacctggagttaatttttccaaatattcatttcagtctttttcaattcataggattttgtcttttgctcattactgactgcataatgtgattataccatagtttaaatagtcacttcctgttactacacacttgggttttctcaattttttactattgtagtactaatattttactatattgtaatctaatctaaatttttacgtattcagagctgttcaggataaatttgcttggaaatttttaaatcaccagaagtgatactatcctgataattaacttccaagttgtctcttaatatagttttaatgcaaatcataagcttatgttagtaccagtcataatgaatgccaaactgaaaccagtattgtattttttctcattagggagttctgggaaatcgttcattcatttacagatgaacagaaaagactcttcttgcagtttacaacgggcacagacagagcacctgtgggaggactaggaaaaytaaagatgattatagccaaaaatggcccagacacagaaaggtaggtaattattaacttgtgactgtatacctaccgaaaaccttgcattcctcgtcacatacatatgaactgtctttatagtttctgagcacattcgtgattttatatacaaatccccaaatcatattagacaattgagaaaatactttgctgtcattgtgtgaggaaacttttaagaaattgccctagttaaaaattattatggggctcacattggtttggaatcaaattagtgtgattcatttacttttttgattcccagcttgttaattgaaagccatataacatgatcatctatttagaatggttacattgaggctcggaagattatcatttgattgtgctagaatcctgttatcaaatcattttcttagtcatattgccagcagtgtttctaataagcatttaagagcacacactttgcagtcttgtaaaacaggtttgagtattttctccaccttagaggaagttacttgacttctcagtgacctaacctctaaagtgcatttactgatgtcctctctgtggttttgttgtggaaagatttagttaaatgaactgtaagaattcagtacctaaaatggtatctgttatgtagtaaaaactcartggatacagtatcttatcatcgtcactagctttgagtaatttataggataaaggcaacttggtagtyacacaacaaaaagtttatgatttgcattaatgtatagtttgcattgcagaccgtctcaactatatacaatctaaaaataggagcatttaattctaagtgtatttcccatgacttacagttttcctgtttttttccccttttctctatttaggttacctacatctcatacttgctttaatgtgcttttacttccggaatactcaagcaaagaaaaacttaaagagagattgttgaaggccatcacgtatgccaaaggatttggcatgctgtaaaacaaaacaaaacaaaataaaacaaaaaaaaggaaggaaaaaaaaagaaaaaatttaaaaaattttaaaaatataacgagggataaatttttggtggtgatagtgtcccagtacaaaaaggctgtaagatagtcaaccacagtagtcacctatgtctgtgcctcccttctttattggggacatgtgggctggaacagcagatttcagctacatatatgaacaaatcctttattattattataattatttttttgcgtgaaagtgttacatattctttcacttgtatgtacagagaggtttttctgaatatttattttaagggttaaatcacttttgcttgtgtttattactgcttgaggttgagccttttgagtatttaaaaaatatataccaacagaactactctcccaaggaaaatattgccaccatttgtagaccacgtaaccttcaagtatgtgctacttttttgtccctgtatctaactcaaatcaggaactgtattttttttaatgatttgcttttgaaacttgaagtcttgaaaacagtgtgatgcaattactgctgttctagcccccaaagagttttctgtgcaaaatcttgagaatcaatcaataaagaaagatggaaggaagggagaaattggaatgttttaactgcagccctcagaactttagtaacagcacaacaaattaaaaacaaaaacaactcatgccacagtatgtcgtcttcatgtgtcttgcaatgaactgtttcagtagccaatcctctttcttagtatatgaaaggacagggatttttgttcttgttgttctcgttgttgttttaagtttactggggaaagtgcatttggccaaatgaaatggtagtcaagcctattgcaacaaagttaggaagtttgttgtttgtttattataaacaaaaagcatgtgaaagtgcacttaagatagagtttttattaattacttacttattacctagattttaaatagacaatccaaagtctccccttcgtgttgccatcatcttgttgaatcagccattttatcgaggcacgtgatcagtgttgcaacataatgaaaaagatggctactgtgccttgtgttacttaatcatacagtaagctgacctggaaatgaatgaaactattactcctaagaattacattgtatagccccacagattaaatttaattaattaattcaaaacatgttaaacgttactttcatgtactatggaaaagtacaagtargtttacattactgatttccagaagtaagtagtttcccctttcctagtcttctgtgtatgtgatgttgttaatttcttttattgcattataaaataaaaggattatgtatttttaactaaggtgagacattgatatatccttttgctacaagctatagctaatgtgctgagcttgtgccttggtgattgattgattgattgactgattgttttaactgattactgtagatcaacctgatgatttgtttgtttgaaattggcaggaaaaatgcagctttcaaatcattggggggagaaaaaggatgtctttcaggattattttaattaatttttttcataattgagacagaactgtttgttatgtaccataatgctaaataaaactgtggcacttttcaccataatttaatttagtggaaaaagaagacaatgctttccatattgtgataaggtaacatggggtttttctgggccagcctttagaacactgttagggtacatacgctaccttgatgaaagggaccttcgtgcaactgtagtcatcttaaaggcttctcatccactgtgcttcttaatgtgtaattaaagtgaggagaaattaaatactctgagggcgttttatataataaattcgtgaagaaatgtgtgctcttcagttctcaagttttattattatggtatttattaaagttctacaattgtaataacgtatccatatgacaagttttaaagtggtaattgaaataggttatcagatatagagttgttcacatcaagtagacttttaacagagtcagaatgaacctacccttaaaattttagagaaaaaaaatcgtcggttgcacagaatagctgctctagcttgcttaattatgccgggcatgttgtcactcctcttacttttgctgccttttcattactatttaatggaatgtccctgaacaataaggaagagcaaaacatagacattttgactacagtggatacttcctctaccccaaatgttatgttataaaagtactttttttgcccaggtactctattatatattttggttttctttgaattagacctcaatctccaggaagctctggagggaaaaaaaggaaccataaactaaagtaactggttttccaaataaatgtaaacttttttaaccttttattattatagaacatttcaaacatacataaaacatgaaaacagcctgcagccaaacttttctggaccttggcagctccagcaaatgagctggtcatcctaaccctggtttcctgagacaactacttttggggatgcttgcttgtatagggagatgatagatagatagatacatatcaaaaagaaacttgaaaaaggcttcgaacagaacttgccgatgttactcatccctcctcggtacagacattctgttwgaacagatggttgtaatggggcagcatcactccctattcccattaaaaacatgaccattctgagatttcaggccccttcgaggaatttttctcaagaattccatacaaactgtcagaggaagaaatgtcgtcccaagactagtccctgtgtagtcttgatccctttacctgcttactgtaattttttttctctgactttccgccagtgtctaagggccatctgtacccctcccacccttccatgagccactgtataatccaaaaacacaccttccatttgctccctcacttgtctccttttacctcaacagtgttagtgtgtaaagaattgcctggggagggtagagggttttacaagtacagagtcccaagtcttttctcccctccccgttagtgggttggcatttattaataggcactgcaagattttgatgcaggtgtggggtagatatcactgtgaaaggctactaatgcatggtagtttcaccgaaagtacagtcttcaaggatccttataatctcctcattgccaaaatcagtaacatctataaccttgacaacaccctagcttgggctgttgcttctctggctacttgtttttccatcccagtttacccagattttagatggatactcctccaattctgcttaaagtccttacctgttcttgcccagttccctctagtcaacctcagtcactcccaaagattcttccccaatcccatatcttttgctcagacctctgtctctgggatttctttgttacctcatagtcagtagtcctaaaaacaaaattcttcatcttgcatctctatcgaccgaccattctttgtttctttttaagaaatgtaaccttcaccccaatcatcaaaatctctcattcctcaattgtcacaggttgtcacttctttccccctaaacctctcccatcattccttccttctttatactgcccttacaggtcctgatcctctgactcacccggacattcttagcagctgcctaatttcactccctgactctcatctccctcttccaatccttttcattgtgctagaacactatcttgctaattttaatatcctctgcattcagtgcctccacagattgccccctcactgacctttccaatttggccttgtgttacacactttcctcgctgcattcctacccagcatcttcacttgtcatatttctcaaatactcttcatgaccagatatttaaagtacctcatccatgaagacttcatcaacccccaaagtgcctccaatgcttccgtggtagcacagcataatggggtacatttcttagttgaacagtgaggagtcactgggattcttacagagtgtcttagggtctcctcttgatactctttccacatttcagttaaggaattttcttacatctttttttcttctaataacctttgcctggagtgtaagtaaattcatgatagagactgtcatttttaaaaaaaaaaacaaaccattttgcctttcacatgttattacctccatctttctgttatcttgtcagtgttgccacctaaatgattgaaaatgaccgagcatgcagtagaatgtagtgaagtttcctatttcatccattttttgcataagtgcattggtatctgtatatccatctgcccaagcaccagttgttgaaaagactattatttccccatgaatggtcctggtacccttgtcaaagaacagttgaccataaatataagactttctggattctcagtcttactccattgccctatatgtctgtcgttataccagcaccgcactgtcttgattgctgtagcttggtagtaagtttagatttgggatgtgcaagtcctccatttttttttttttttccccaaaatcattttgtctgttttgggtcccttgcattgcatatgaatttttatatgatcattgtgtcaattcctgcaaaacagctgggatcttgatagggatttagttgaattggtagataaatttgagaaataactgctattttaatggtgttaggttttctgttccatgactgtgggatgtctttgcatttgcttaggtctttatttcagtgatgttttagagatttcagtgtgcaagtcttgacgtctttaatttttttctaagtattttactgatgccactttaattatatgattattttctaatttttatttttgtattcatcactggtgttagaaataaaattaatttttgtatattgattttgtatattgtagcttttctaaaattctttttttgtcacttagtattttttgcatatgagatcatgcatctgtgaacagaaatacttttacttcttcctttccagtctagattcctattatttcattttcttgccttagtgtgctggctagcacctccagtacaatattggatagaagtgacaagagcagacatctttttcttgttcctgattttaaggggaaagcattcagtctttcaccattgagtatgatgttagctagctgtgggtttgcttcaagttgaggaaattcttttattaaacctagtttactgagtgttttttaatcaaaaaaaaaaaaggaggggctgtgggttttgttaaatgcttcttctgtatcaagattttcatgttgttttgtcctttattaatatgttgtattaatggacttttgtatattgaattaactttgcattcctgggataatctcagttgtccatgctacataaaccttgttctatgctgctggatttggtttgctagtattttgtttagaatgtttgcatctatattcataaggaatattggtctgtagttttcatattatatatctgtccagtttggggatgagagtcatactcctgacagaatgaattgggagctttccctgttcttaaacctactgaggtattttttaagtgaactacttggagaccttcacctgtgatcttcagatgctgggggacacagggatggtacctgactctgaaaaggctctcagggtaagacgtgtctgaactggcctgtggcagttaactaaagagtactcctaccaataatggagtcaagatgtatgtttcccataggccacgctggtcactgaaagagatgggctatgagccatcttgaaaactaccctgcacaaatggactgccggcctggagccaggcaccctgcagctgagtgccatataatgttgaagctgttgagggaggagaggttggaagctgccagcttagagaatctcagctgtggtttccagcagggtgtattccaggaaagaaagtcattccccaccctggctcaaagtaataattaacagtgactgggtaaggcaggatctttttttctaattccctcccctccagaaagggcagcaacagctcttgaatgggaaagaaggtggagggaggaaaagaaaaaccaattgccccaacactgctgtctttaagcttcccacccaaagacctcagtaagaggcagaattatgttttcaattaagagagagtttggcctcttggtgtttcaaaagtgtaggctttttaatacctagagaaactgatgatttgttgattaccaaaaagggaccagaaaagctacatagcctgagatttcatccccagaaaaacgaatccagagagcagacttgcaaaaaaaaaaaaaaaccgttctgtctctgcctctcccactacacatacacagtgagaaagagagtcttcatgatttggtaaattagacccatggaaagactcgggacatttaggatgatgatatttacgatgaggaagatttctatgggaaacttttttttaacttgtctctaatcctattccaactgaagtttgaatttttttcctttcattaacatttactgggcaaatacctattgaatgtttgccattttgcagtgtgccataggtttcaggctgattcagagctgctttgttgaatcaagaagtctgttacagggagacaatctagttagaccaggcataagtacaaaccactaagggtaaaagaagtatgtgaaagtacaatgtgggcagagaattcagatccaaaaatactgcagataggtaggtgatgaaggtcaagccgaatcttgacatacaggataggtgtatgtgagtgagttaggtggaaagtctagtatgtctgagtgtcaggctgtaagggattaagatgagattgggaaggcaggcaggtcagataatgagggccttatagaccataccaaggactttggacttttattttgcagacgttaagcaaagacataatcacttttcattttatatttattacaaactgaaagagcacaagtgcacatgtggtctttgcagttaagttattgccataattctaaaaaggcagataatctgaagatagaagggaggccacagtccaagacatgctagggactctgattgattcagtgctcatgcatgggaaagataagagtcaaagacaactcccacatttcaggttttgagagctggacggacagtgttgctgttaggtctatagagaagaggagtggattttgaagggaaaattattaatagtacaattgaatgatgttttagttgtgtctgagggatatccagggagagctgtcctaaggcaattaaaaatatgggtctagagaaaaacgtacacagaagataaaaatgtatgactccagcacatagaccatagctgaacctgtggctaggaaaattctcctggaaaaggcagagaggagagaaggacaaggatggaatgcatggaaatgctagcatttgagagttatacacggaacccacagtagaggcaaatgagaaaaagcaggtttgtttttgtctgctccagtagacagacaccaagctccatgagggcagagactttgtcttattcgtggctgtacctgcagtgcatagagcagactgtacatgtgctttgtggacccatgcagttactggggtgtctcagaaacttcccatcctcctccctactgtgtctttgcataaccctggctgggcctcccttttctcaatgtcaactctcactgtaactttttttttttttttttttttttttttgagacggagtctcgctcattgccctggctggagtgcagtggcggaatctcagctcactgcaagctccgcctcccgggttcacgccattctcctgcctcagcttcctgagtagctgggactacaggcgcccgccaccacgcccggctaatttttttgtatttttagtagagacggagtttcaccgtgttagccagaatggtctcaatctcctgacc

SEQ ID NO: 94232 - DNA, 48666 bp, Homo sapiens
aagacaacaacactaatggtgttggaacaactggacatctatatgcaaaaaattaaccttgacgtcaatctcacagcttacagaaaaattaacatagaaggcataatagacctaaatgtagaaaatgaatccataaaacttgtagaagaaaacacaggaaaaatatcttcctgacctgaggttaggcaaaaagttctcagacatgacactaaaatacagttcacaaaacaaaaaaagtgataaatttgacttcatcaaaattaataattgttggtctacaaaatactttattaaaagacaaactatatgcaaggaaaaaaaatttgcaaaccatatatctggttaagaacttaaccagaatatataaagaactctcaaaactcaacagaaagcaagaaacccaagttttagaaatgagcaagacttagacacttccccgaagaagatactcggatgacaaataactacatgaaaaaatgatcaacaccactaggcattaagtaaatacaaattaaaaccatgatcagatgccactacacacaaattagagcaggtcaaatagaaaacacagacaataccagatgttggccagaatgcaaaatggtacagtcactctagaaaatgctttggcagcttcttccaaatttaaccctacatcttatgactcagtgatcacactccatgatatttaccctaaaaaattaaagctcatgtttacacaaaaatctgtatgtgaatgtttatagcagctccatttataattaccaaaaaactggaagcaacacaaatgtccttgcatgggtgaatggataaactgtaggaacatccatacactggaatactactagcaataaaaggaataaactattgatacacacaatcacatgaatgatgtgggggttgggggtgtttctggggcaatgagctattccttgatttggtgatacattaagtttgttttataattattcacacaactatatatgcttaatgttcatttgtatgtatattttataattaaaaagaaaactgaagaacccaaaattctgtcaaagtcaaatatctttagacaaatcttgaggacaaagggaatggaaattccatcaaagtggtgcartgacctgagtaggagtttacagattataatcttaacatcattatgctgaggtaaagaggccagtccccaaaggttacgtactgcatgattccactgatatgatactctcaaaatggaaaaattatagtgatggaaaacaactcaatggttccctgtggttagggctgggaagagcatgtgactgaaaaagggaccgcccaaggaagatttgtggggtgacaatactgttctttatcctgatcatggtgttggttacatgaatctgtacatatgttaaaattcacaaattgtacacagaaaaaatgatgagttttgctataataataattgataatgataagaatctaaaataataatgagtttgagatgaatttgcctgtctctatctcaacgtcccaaagttatctccagatgggaatattcattttccccatcaaaacaggaacttcaagcctgtggtttagatgtgttttcaaatacacaaattgcttttgaatttttattttgaatgaaaggttgcggtggcacgacatctgatttcctacagaagagaaaacccgagacatgggactttccgaggcagtttgggagggggcagggtggctgcagggagagaagctgggaagctgggagaaggcctgagaagtggggtggaggggagctgctttcccagactctgaccctccagacacgagacacaaaggaggttgccagattctgagagtaaaagaccattttccagcagaaggaaaaactgggttgacattcatttatctgagtgaagaatggtaagaatttacatccaacctaaccattaaaggactgatttagaagcacttagaagaaaaattcataccttctttagcctgagaaagtaatttaccaggtctttatttcagttttactctgccaatgtttcttaggaccttaatgattaacaagttcaaaaacagaattagaacaagattaattttaaattcaaaagcctggttccgtatcacaagccagctagatgtgattaattctgccgcctaggggctacaaaaagttttccccagggaaagaaatagaaaagaaaacattaactctttcatgaaattatgtgaaaaatattaattcattaattgaacaaatgtgtattaatatctctcatgtggcaggcactgtcagcactggaaagggaactgtgaacaggttggacagtcccctgcctcccccaacccacagtgacgttgaggagtgagggccaaaaagccatgacattttccagtcttcgtctggcgcgccccaggctacctgctctgctccagccaactagtcagaatcacaccattacatcccccaggccccagagttacagggcaggcagggtttttcctactgtttcactgtcttcagccagtttctccttgtcccacctcatcggctaggacacacaattcagcaaacaggatttccagttctgagctggagccaacccccgtcacagcccaccctagctgaacatccaccgtgatgctggcctactcctgccccaaccctggcccagtgagatgcagggctgccgattcattaggaagaccctctgcacttgaaagaacagtgtggaaacaatctacaggaaaggatcttcttgaaaacatgagtgctaccctacaaagagcccaggagtggcctctcctccctcccccacccagtcaaggctaggggcacagagaaacctgcctcctccccagcagaggcaatgtgacccagggcccaaagtagaatgccctgagaatgcagccccagtcccccagcacaatctggtcacctttagcctcaaagacaaggatttctcaaacaagacataaaaagcaccagccataaagaaaaggactgataagtccaaatccactaatgttaaaactttctgattctcaaaaaacgaaggaaggaaatgaaaagataagccacataatctgataaaatattagtcaacacataaataacaaaggaccaattccagaaggtgttaaattgaatcatatgaaactgccattttttgtaagtcaaaaatggtcaagtgycagcaatttcacatgaagaattcttaaaaatcattaaggcggacaacccaacagaaaaaattgccaaagatctgacactgtacataagaggaagcccaaatggccaataaatagtggaaatgtgttcaacctcatcaataaaccaggtagtcaaattaaaacctcaataagataacatgaactaaatccacaatattccacaaaaattaaagtctggcaataccaagtgttggttaggatgtggagcaatgggaactcttgtacactgctggcagaaatgtaaactggtacaaccactttgaaaaacaggcatgaactagcaaagttgaaatatatgacttatgactccaccattgcatttcaaggtatacacccagatacacgaattaccaaggtcatgtgtgcagaaaggattataaatacattgttcataatatccccaaactagaaacaagactaatatccatcatcattagaatgaatacacccattgttgcaaattcctagagtagaaaattacacactaatgaacaacctacaactacataaaattaagaaaaataaataagacaaaaaaattatctttggtaagaccctgtttatagaaagttcaaaacagacgaaaccaacttatatccttcaggaatgcctacaaaaaaggaaaaaaatctagagaaaagcaaaaaagtaatttgcacaagagttattatatggctcatttctggagagagggagaaagggaggggttgttattaggggactggggttgcttctggggcaatgagctattctttgatttggtgatacattaagtttgttttataattactcacacaactacatatgcttaatgttcatttgtatgtatattttataattaaaaagaaaactgaagaacccaaaattctgtcaaagccaaatatctttagacaaatcttgaggacaaagggaatggaaattccatcaaagtggtgcagtgacctgagtaggagtttacagattataatctgacatgaaaatcagaaattatatgaaccaaatctaagagggacagctaaatggccaccgcctttaagtaacaatgtccctcttttagactctaaataggattcaagggatcccagtagtgtcacatagatgtagacacatcccaacagtattctctagttaagaagttcagcaagatggaaactcatttcccaaaatcaagaaccacaacttacaaagagaaattatatgctgagcagcacttttgaggcaggagatggtagagagggaaccagagactggatacaggaagaatgagtgagagcatgagagcagaagcaaggtgaaggggcgagtgagcaagaagtgagatatgaagcagaggctgagcagccaaaacaaaagtgagattttaaaaaagtgagtaaggagcccacatggccgcctagatctggaccaaacctgtcaggggcagctcctcagagatgagcatgcacgttagacagaaaacatatccttaaaatgttcccgtatggtaattagctacttaaggttcatgcatatggactgcatattatgcacgtacttaaaattatgggatggaggtgactcgcaagaagtcacaagcgcacacgggccatagtattaaataactaagcagcccacctgtccatcaaaaggcagacactggctagacatcaggcagtcttggccacagaagagaaaaaatatataaaagaattcaaagtacaccaaattgacgttgatctcatttcgcagaggtcagtccactctcccctctctgggagtgtaatactatgcgtcatacacttttgctgctttgctatctgtgtgtatctcgtccaattcttcggtcaggacactaagagcctggagctgcacagcaccatctggtaacactttcaagaagaacaaaataaaaccaacatcagggatgccgctagttgcagaaatgtttgcgaaagttgatcaaatgaattgggtcatttttgtcatacccaactaaaacaaagtcaaaaagccagggggaaaagcactcaggaaagatagcattgctccaagaatgtaattctccgcatgtctaactgctgaaaccaactgttgtaacctgagaccagttttatctaccctgctgagataacttgctgcaactctaggactaattttgcccaatgccattgcccaccagttggaacttgccagctccctagaaccttattagtgccaatgaactttctcaaagagcaatgggtaacattcggtaaaacctccagccttctctttgttcttacggtgtgcatgtgtgtcccaagtggcaatcctttcttcccaaataaacggttaaatttagagctcagtctctacttttttattttgacttcaacaacttgaagccagaaacagtaggaaacgcagtaaaggaagctgagagtatgaacgcccatgccacagctgaattaataaaggaccaccgggtttggaggccgggcaacagatgagaggaactttagaaaggtggtgctatccccagtgagcttgaggaacacatgtctgtccctgccatgtagaggaagatagtacctggcattttacctggccacagcacacacacattaaatatttgctgagtgaatcccaaaccaggagtgtttccaaactccccaaagctgcgctactgggacacgaggtggtgctgtgcgcattcatggggtggggaggcggggcttagcacatagctccctcatcattggctgttagagagtgagcggcaggcaggttgtccattggataccaagatatggcggccccctgactgggaagacatgaccttacacaccttggttctttaacttgaccttgggaagacagggccagccagcaaggtggctggggagaaggccgaggtccccgggccgcagacgggaattgagggtcaggagccgaagtgraactggagccggcgccasgagatgcagccctgaagggcacctccacccagtggccctcccccaccccactcccggggccctcctggcccagcgtcaccctgctgcgctaggacctacaagggcggcctctgggagccctctgctttacctcctctcctgggtcaggctgcagaaagaacaagctcctccaccctgcctggtrggcatggaaggagggcaagtgttggtagccatggtaactcggggtagccatattttcgtgcagtcactctgaccccatctcgatggacaaggattgtcccatctgtttctacaactgtttcccaaacaggcagtgctgtcctaaggaagcacccacctggcccaaacatgctgtgctttctttgtggctgccttgcctccccaaccaattgtaaccccttggaatcaggactgtctcccgtgcgttttcttctctctgcagcctcgcctgcaaaggcttctgtgccttccctgagatgccctagcaaatgggtcttttcgaacattacccacctcaacgtaagtcctaggccaagccggttctctgcttattcagaacagagtgcgtctttactgtcatgccattacctggcaaagggaattgccggacggcaggtggcacagaattcctttggaactccaaattcttttttcagcttagtcttccctatgattctgacattttctacctraaggcagaacacatgggttgagcttgggttctcagaatagaggggtggaaaccaaagcgggtctgcttgagaggattcatttttgagccttcttcccaacagagtatgtagccagccctgaagacaaaaacaaaagaaaggaatgagatcgaagtatctgttcccctggcttcctctgtgccagatcacagcctggcttagcactgttctgccaaaagccaccgatttggtcaggtgactgtgtcctgcaagtctcccccgatctattagccatgccctctccttgcctcttctcacctacctaggggtgaaaatggcctccaactacgcttagcttcaaggtgcttcacctcctctggtgatgtccttgcccctgcctcatctttgtaaatagtcccttttttaaactcgatattcctccttctgagaatgccatttcctagcagaaccctaactgacttttctttttcttcaactttactctcctttgatcctggaatcaactgcattcaccagagagtacctacaattgccagctagtgtgctaagcactggccatgcagagataagaggcacaggttacagtctgtggatatcttgggaggccagggctatgatggaggtcagctccaggtaggggcatggcggagagaggaagatgatcaagggaggcatcagagagtcagcagcagccaggcaaaggtcggaaggggcagagtgttccaggcaaggggtgtgtgccgagataggagcctaggtaggctggcattgctgagacggatgagaggtcagaccctagaggtacacagaagccaacatgtcccagtaggcggcctctggaggactttggcagggtggcaaatggccagattcccactgtggaaaggtcattctagcagaggcagacaggctatatttggaggagacaagtttgggagcaggaaagccagtaggagtctactgcaggaatttaggtaaracatagcaaaagcacaatccaaaataatacaggaggaaatggaatgcaggagataggtgaaggaattctcaggaaatagaacttgctggggcattgggtgtgactgggaggggaagaaatacgagtctggcaggactctcacatgcctggctggagcattcgtgggtttatggtggcattcccatgataagggaggggcaatatgttcttcctggaatttgttgagtttgaggtacctgtggtctaggcaaggaaaaatgcccatgaggaaaatggggatatgggtctgaagctcagaattgtctagactaaaggcatgcagttgatcatcattttcatgataggggaggaatggtataagcaaggagtatgctaagcttctgcttccgtgctttcggttgagaagtaggtcattgaacaataatgaaaatgctgaacatttcttgagtactgactacatggcaggcaatatacgaggtacttcatggtgaatactttgacttcatttattagaatcctcacagcaaccctatgaggccctgactagtgttttccccatttttgaactaggaaactaaggctcagagaagttcagaatttgtccaaggccacacagctagaaaatgtcataactgagatttgaatccagactttctgactcccggttcacctcagttacttgttctataaaaagattttatatttttgtccttcatgtagtttacccccaagaacaggtaagccttaaagatgagaccagaattaactgcccttttcctacaaactttcagctttcaaatctgtacctgttgatgagagaacctccaggtttgtcccctactaccaatgatgaggcaaacacagagagaggaacccctttgactaaagctgaattgtaaaggactaaagccctaacttctcttcgaatgacctgcattcaaatcaagtaagcagctgttcaaagaattcagtcggaggtatgacttgtgcagtgagagttgaaaacgcaaatcctgttctgtacctccctgtttaaagcattgcactggctcctcgttgccttcaggataaagtctatattccctccacatctccttccctactcctccagcattctgactggctgagccaactacycttaccccagtacagacaacctaactttgcagaactactcacaattcctaaacaccatcgaggatcaagcctctgcctttttcccttcaacattttactatgaaaattttcaaaaataaaattttaaaaatttacaagtgaatacttctctatctagacactaaaattaatattttcctgtatttgctttatcatgtatcaattcatttatccatcccatttttgtgcatttcaaagtaagtagtagatatctgcatacttacccctaaatgcttcagcatgcatattattaactagagttccaaatttgtttccagttctttttttctttcgtatgtaaaattaacatacaatgaaattttttcccattgtatgtaaaattaacatacaacgaaatgcacaaatattagaggcagtgtattagtatccttgctatggtaacaaatcaccacatacttagtgtctttaaatgacatacatttattctcttggaagtccaaaatcagtctggctgggccaaagtcaaggtgtaatcagggctggcttcttctggtatctctgaagggacaatctgtttccttgcctttttcaccttcraaagcattccttggctcatgaccccttcctcacatcaccaacctcttgctttcatagttacctctcctactcactctgatcccctgccttcttcttataaagactgtgattacatcagttccacatggatarcgcaggataatctcccatctcaagattcttagtttaatcgcatctgcagagtcctttttgccatgtgaaacaacatattcacagcttccaggaatcaggatgtgaccctcttggagagcaattattcagcctaccacatgcacatctaatgagtttttacaaatgcatacatytgtgtgactcaaactcccagcaagatagccttaccatcacccccagaacattctcatgccccttcccagtctgtcccagtctcaccctcaccccctagagccagccactgttctttttgcctcttcagaacttcctatagatggcgttatcttgcaaatacctggtatggtgtctggcatgtagtaagtgctcaggaaaggacttcatcttttgaatctgacttctcttacttgacacaatgtcctgaagactcatccatgctgcgtgtatcagtctcagtctgttccttttgattgcagagtaatattccatcaaataggccacaatcagatagttcccttattcatccattctcctgttgacagactccagactgcttccagtttttgtgcttttttgtttttgtacaaatctatggggtacatgagaaaacttgttacttatgtgtaatgtatagtgatcaagccagggtattccaggtgtccatcacccaagtacaatacattttgttaagtatggtcaccctcctctgctatcaaacattgaatttattccttctatctaactgtatatttatatgctttaacccacttctctttgttgatggctgctgtgaaacctcagttcttgtgttcctagtttaaaggaatttaaacaggagacacacagcaaaggagatgcagtgtagagcaatttattgcaaaggaggaagaataccctgaaagttaggtgcagaatagacaggatgccccaagagggattcagggtgggctgcctatgaggatgagatagcaaagacccacttgagggagactccctttatcgaaggcttacctgattattcatgagggggtgggaaactgtgttgctaggaagcatgttctgggatgggtgcacatgtgcagtacctgtacatgcttgttcatacattgcatgtgtcattagcaccctaaatctccaaccaggggtgttttttattattatattgagcaaagggtcagtctgaggacaggtaaaatcaaaatgtgcatgctctctacaggggaaattccctactggagacagctttgctgaatgagcttgactgcagtgcgaatgctggggcttattgtggtgactatgaggtcaccaaggttgccaaatcccaagggcatagtaacttccttgactaactgtcctgcctcatcttcatcctccccctttccccagactcacacttcccagtctctgttctttatctttccactctctacctccatctctgttctctatctttccactctctacctccatatgatcaaattttttagctcccacatataagtgagaatgtgtgatatttgcctttttgtgcctgacttatttcacttaagataatggcctccagttccatccatgttgctgcaaatgacatgtttcattcatataggcttgtcatatatggtctttgttattttaagtatgttccttttatagctagtttgttgagagtttttatgtaaattgtatcaatttttatcaaaaatttttatcagaaattttatcaaatactgtttctgcatttattgagatgatcatatggttttgtccttcattctgttgatgtgatgtatcccatttattgatttgtatatgttgaaccatctttccatccctggcataaatctcacttaatcatggtgtattatctttttttttgtttttttttttttgagacagagtcttgctctgtcccccaggctggagtgcagtggcacgatcttggctcactgcaacttccacctccctggttcaagcaattcccctgcctcagcctccagagtagctgggattacaggcacccaccaccacgcccagctaatctcacttttgttttggctgctcaacctctacttcttatctcacttcttgctcacttgccccttcaccttgcattgttagattgttaattttaatgtttctactttttgatggaacaatttattgctataaatttccctcttagcactgcttttacttttctcacaggttttggtatgttgtgtttccattttcatttctttcacggaactgtttttatttccatcttaatttcttattgacccaatggtcattcaggaacatgttgtctaatttccatgtatttgtgtagtttccaatgttccctccttgtattgatttctaattttattccattgtgctctaagaagataattgatatgattttgggaaatttgttgaggcttattttgaagcctaacatgtggtctatcctggagaatgtaccacgtgctgatgagaagaatgtatattctgtagttgttggatagaatgttctgcaaattgttaggtccctttgtctatagtgcagtttaaatctaatgtctctttgttgactttctgcctagatgatatatgtccartgctgagagtgggggtcaatctttgtgcttcccaacctgctgctgaggttgctcctttggcctgtaataacctcaccactagcatctgttcccctcacaaagaatcagtcacccttgtcagcctcattatacccagtacaaaggccacctgctctgggaaacatttcccaaaccactgccccaccctgggtgactggaccactccctcctccatgccctgtacatacctcrctctctgcacctggcccttttatgacccttacttgtttacttgacccttacttgaggacatctgactctactcactctagttcatgccccccagggcacagccagggcwtttcatatctgtgtctgcacagcaagggcagtatagtgtggtagggctgtgcagctctgaaagcactgccagggtgggttgagatcttggttctcatttctttttttttttttttctttttgagatggattctcactctgttgcccaggatggagtgcagtggcacagtctcggctcactgcagcctccacccccgggttcacgccattctcctgcctcagcctcccgagtagctgggactacaggcgcccgccaccacgctcggctaatttttttgtgtttttagtagagacagggtttcaccatattagccaggatggtcttgatctcctgacctcgtgatctgcctgcctcggcctcccaaagtgctgggattacaggcgtgagccaccgcgcccagccggttctcacttcttcatatgtaatctgatgaccctcacagggtcattgtgaggagtgaataaaatatacacgtgargcacttagcacagtgccgggcacagaatctgcatctgattcaaytggggcataaatggatgaaggaacttgttaaataatgacacaatggccgccttggwttctttgcattctcgttggagtgagaaatctcctttttctgaaaactgacctgaatgtggaggacagacaagtagtgactcttggctctgcaatccatgagaagagctgctggcttatatccataacttattttgagttttattcaaggacacagaagtccacttcttcttggaggaaggacagaatttagtccaatgtctgagaagctttaataggctgccagggwaaagaattatgagctgcctctttctctgggacatatgtgccattgttttcctctcagcacaaagactttgctgtgccctggggtaggggctttgcttcactgtgaaactggctccaacatagaccttgagattgctaaatgttctcattctgagctaatctggagcctaaagaggttaacaatccagcaacaackaagaagaatattttratggaatttctccttgtctttgccatatattatatgccttttttcagagtacrctattcatcaagaacttgagcttctcgaacactatattttggttatagacttttttattgcttttttatgattataaaaataaatacatgcccattggagaaagctgggaaaaatggaaaagtataacaaaaagacaaaaattacccataatttcacaccccagagataaccactgttaatatttttgtrtgatcttttcactagtgatagatagataaacaaataagtagactgacatacaaatgcattaggcacatttttcccacaagtggaaaaacaccaataattagatttcttggtccaacaagcctagttgtttgtttgtttgttttgttttgtttttgaaatggagtctcgctctgtcacccaggccggagtgcagtggctcaatcttggctcactgcmacatcatcctcccrggttcaagtaattctcctgcctcagcctcctgagtagctgggattacaggcacgcaccaccacgcccggctaatttttgtatttttagtagagacagggtttcatcatgttagcagtctggtctggaactcctgacctcgtgatccgcctgcctcagtctcccaaagtgctaggattacaggcatgagccaccacgcccagccacaggactagttttttacaggcttcaatgtgaccaaggtggactgaaggaaaagctatattgaagaaaactcctgaacctgccaactgggaagatcccaagagtccagactgggtggtcatgtggaccctcatccttcacctgctcatcctgcctaggtaagtgtttgcttagctcaactctcagaggcagcaaaggcagcaaatgagatggtgaattacaacccaaagcccaggcactggactgggcagtgtggtagggaggtgcagagattcaagtgaagacctacctgctcccccttccccttcctcctagatccctgtcaggtcctttcacctgagccttgattccatgtgactatgatagttggttgtttggttggtgcccatrtttgtttkctagagctgccatagcaaagtaccacaactgggaggctgaaacgcacayatttatttatcacagttctggacgctggaagcctgagcccaaggcatctgcaaggttggttccctctgagacctctcctasgctcayggatgtctgtgttctgcctgtgttctcctcatcacatggtcatccctctgtgtgtgtttgtgttccaattacctcttctcataaagacaccagacatattggattaagactcatctaatgacctcatcttaacttaattacttctttatagaccctatttccaaatatagycacattctgaggtactaggggtacgacttcaacatatgmattttgggggacacagttcagcccatgacagcrcctcactaggtgctggtgatacttgatcctgaccaggctgctccatcaacaagagtaaygagtggaaatttcagctccttagaaccaagtatttttaaaatgaaaaaaaaattgaacttaatgagaatttgctgtttaacttttaaaagtaaggcatatcacaacaccaatgacattcttcrcagaaataacaaaagtattcctggaatttgtatggaaacacacacaaaaaaaaacccaaaaagctgaaataagcaaaaagaacaaagctagaggcatcaaacttcctgacctcaaagtataatacaaagcaatagtaactaaaacagcgtggtactggcataaaaacagaygcataaaccaatggaacagratagagagyccagaaataaatctacaccttcatagccacctgattttcaacagcagtgcgaagatagcacagtggaaaaaggacaattgcttcaatagaatggtgttagaaaaactggatatccacaaacagaaaaatgaaattacccccttatatctcaccatgttcaactcaaaatagattaaagacttaaatccaagacccaaaactattaaactactagaagaagacatagggggaaaactccacgacactggtctgggcaataatttttttataaaacgttaaaagcatggataacaaaagcaaaaagagccaaatgaaattacatcaaatttctaaaaatttactaaaaagcttctgcacaacaaaggaaacaaccaacagagcaaaaaagacaacctaaatagtgggagaaaatatttgcaaactatacatctgacaagcagttaatatccaaaatatataaggaaaccaaacaactcaatagcaaaataataataataataataataataataataacccagtgaaaaattggcaaaagacttgagtagacattttgcaaaagaagacagacaaatggccaacaggtgtatgaagaaaagctcaacatcactaatcatcaggaaaatgcaaataaaaaaccacaaggagatatcacctcattattatggctattatcaaaaagacaaaagataacacttgccatcaaagctgtggagaaaagggaacatttatatattgttgctgggaatgcaaattagtacagccattatggaaaacagtatagaggttcctcaaaaaattaaaaacagaactacaatatgatccagcaaccccactactgggtatatattcaaaggaattgaaatcagtatgttgaagagatatctgcactcccatgtttattrcagcactatgcacaataaccaaaatatggtatcaacctaaatgtccatcaaaggacaaatggatttaaaaaaatgagttgtatatatacacatggaataccacttatccataaaaaagaatgaartctgccatttgtgataacaggatgaacttggaggacattctgtaagtgaaataagccaggcacagaaagataaataccgcatgatctcactcatcaagattcatgtggaatctaaaaaaacctgaactcaaagaagtagaagctaggctggttagaaaggagtggggagatggggagatgttggtcaaaggatacataattacagctagttaggaggaataaatttcaagagatctgttgtatagcaaggtgattatagttaatgacaatatattctcttcttgaaaaatgtagaaaatggacattatgtgctcttaccacaagagcgataacttatatgaagtaatgcatttgttaattagctaaatttaaccactctacaatgtatatgtatatcaaaacatcatgtttcacccaagaaaaacatacaagttatgtcaagtaaaaaaaaaaaaaagatgaaaaaaaaaaaagcaaagcagatttctctgagcaccaycagtgcctgcrttgagttcttttttatcaatggagctgctccatgaatggctctgagtcttgcctgcacctcggaatcaactggggagcttttaaccccaccccctacaaacccaggycyccctrtctaaatcagaatccggaggtgggacctctgggcaccaatagttaggaacactgcctgggtgattccaacatgcagccagcggggagaacaccccacaatggctctggtccagggcatgggtctttgggggctttgcaggggctccacggggcctccactgaggttccttaggatctgcatgactcccttcagtcagcacctcccaggcagtgaaatccggagaagggcttccaggctgtggctgcctcccttagaaaacaaaacctttatagaacagggacacagtgaaggactcaggacaaagcaggcagttggatgcttgtgagacccaggaatgttgtggagttcacgcctctgggcatcctgtgcccacatcagtcacagacaggaaaaaccaggagaagcagcatcatggcccattcccagagcaacagaaaagcccagggatcagtgaaactcagggagacaktggtggcacaggaacctaagtgggatgagctgacctaataacccagaggcacagcctagccaagaccctgcttctgtggaaagttttggagccccgtggcagaggcctttctaccctgagtgctcacaaatctcctaagccaacaccagctcatcagctccttctgtcactcaagagaagccttgaatcacgtccatarcaatgacaacctgctaaggcacttagatgctcatgctgggcaatgtccattcttctcctgcactgtgcagtcaacaccgtccctcaggtgacctggtggaagtccagcagaccagcttgagtgaggaaactcctcagtgtccaaagccaccagggtttccttccagtgtgccattaaaccccaagaggcaagaagctctcctgctggagactcacatccaaaatggggatcagacacagcaaaagctgctccactaccccaggaccctacccatgagagaataaaacctcttccttctcaaattgggcataaggctcactgttcttaggtagctcgaaccctcattggctttgtatcctgagggtgctggaaaatcacttactaaggagatggagcaagggcttagtcaagacacctatgctgtagaaaacagggttcttctccagagactctgggtgcagctggcccaggacttggtgcagacaaagaacaattacagggatgtaattgttcaggatgtttcagagatgggtttctcgtttgaaaaacgcctttctcagaggattgttgggaaggtggaatgagataatgctcataaagcatttaaaacggggtctgtatctggagcagtgcagtgtatgttggcatggtggtcacagtcacycctctgtatgagctccataagtacaatcagatacactatctcagttttcctctctccgtggttttgagcctgctcagagtgggcctggggtgcctttcatcaaataaacttctccagggcttgagggctcatcaaacccatcacatgctggggccactgggtagaaagtggggtctaagctttaaggagagacttccagtgcatagaattggcatttatacaggacaggttccaatggcttcaaatcagagatagcacaactattggggtgcaaaacatttttaagccccacaaaaagctaatttatcatactggagccctcmcttctagaataagttataatgccattgagatggtaaaagatatactcagggtctaatagttgtttgaagatttttaaagttatgtaaaaatatttgcatgggccaggtgcggtggctcacgcctgtaatcctgacactttgggaggctgaggtgagaggatcacttgaggccaggagttcgagaccagcatggccaacatggtgaaaccccatctctactaaaaatacaaaaatcggctgggtgtggtggtgcatgcctgtaatcccagttactcaagaggctgaggcaggagaatagtttgaacccgggaggcagaggttgcagtgagctgagatggcgccactgtactccagcctgggtaacagactccatcgcaaaaaaaaaaaaaaaaaaaatttacacgaacacacacgtaagcatggcatgctccctgacacagtgagtcttttttctcaaacacacatcctagcatagacacaaaagcccttttccaggagcagatttagaagggctgcctatggcagtgaagggtgcagagaaagttgagggctcgggacataattcattagcagagaaaagttctcatttgcccccacaactgtttgaaagaaatgccccttgtaggtcttgatgctacctacacagggatgccatgcccttcgtgagattgctgcaggtttgggggccagaaaaacccaagttcaaatcctggctgtgccatttactagctgtgcaacttttgtgtcgtaggaacgatgcctactgtgcagagtcatctctaggattgaacaagtccccagcacaggagtgccagggccatcagtggatggcaggcgtgatcattgttcttcattccttagccaaacccagaatttctcaagttaatgtgaaagggaccctcctaactgcagagaataactgaccatggcctccatgtgtccccctgagtgtcacctgcctgcaaggcctgccttccattaacatggacacagggcacagcttcatttctccttagcacagttcacacagactgaaacttgtaaagccaaactttaccaaatcctagtggggcacaaatcaaatggagagcaaggctggaacctggcttgcagctctcaaagcttcatctcatgatgttctccaagcccagcccctcccagccctaagaccccaattctggggctggctactgacctaactacttgcctgggcctcatccatccctctactctggtagataatgtatgctaataccacgggttttttttccttgctatttataaaatcctaccacctttaatgaaaaaataagtccctaagctggagaaagagcccctggggtacaattctagtggtaagaagctgccaggctctcctgatttttcatgttactggtygcagcctgaaggtgcattttcaaatagcctgaaggcttcctctggtgctcacataggtgcaaatgtcaaccagcccyttcaattttgtttcttcagtcctcaacctccctccagacccaggtgcrgtgtcactgcaaaggggcatttggttttaaagaaattaccccctgtctagcactccttccttctgccaatggggagctgtagaagaggaaggggactaaaagagaaaatcataacaggaaggaattggagccagcaagggytaagctcagaaccagcatccaagactttggcctcagttacctgttacatttttgctgctgccaccagtctgcctggggcctctcttcctgatgcctgctgatacctggcctagcagctctcatcctatcaacctattcatctaacttcattccctgcaagggctagttcactgcccactgccctgtcctccctccccaaccttctcaacccaagccagtaccagctacataaattgcaaagcccagtataaagtgaaaatgtggggccccttgttcaaaagttaagaatctaaagacagcagcggagcgttaagccaagtagagagcccttctgagtgtgagacgtgggagactgcacagccgcatggccaggagcyggtgctgactcagaccactcccagttgtccttggcctcggcctaaggagcctgcgatgttgtataaagactcttcccttgagttgagagttaatagcatcctttgaaaccaggttacctagcatgttttttycttaaaatgccacagggaaattaaaagttttctgacgtctaggtacctaacacctcttccatcttccttgtccatgtcatctgtttattaattcactccaaaacccaaaaatgagcagccactgtatcccatgcgctgtgttggtctctgtggttctgaataaattaagacagaatccctgacctcaaggaagccgtataagagacagacttgtgaacaaatagttataaagccatatgacacatgcaatgagggagatgggcaagtgccctggaaccagagaggacaagccagctatgtggaagatgtaaagagggtggggacagcaggggtagggggtagttggtgctgagccttgaagcaagagcttgctcccaaaataagaagacagaaaggcttgcagaaagggaacaaagccggcaaaggccaggtggccccagtgaacctggcatgatttgaaatagctcaagcacagggtgaggcagcattagtgtaccaagaacaaaaggaagattggggctaggctgtaaaaggtttttaatgccaaattaaatagtttatattttatccaataggcaactggaacccaccagagggaggaaggggacatggtcagatctatcttccagcaaaagcatgaagggcagattggaggtgctcaggaggagagtcagggcgtctggaggcaattgcagttttcaggccaaatcacaagggcttaaatgtagaccagaagttctcagcagggcagcagttttgcctcccaggaaatgactggtaatgtctgaagacatttttggttgtcctgatagggcggtggctgcttttggcctctagtgggttgaggccagagatgctgctagacgtcctactacacacaggacaggcccgtgagcatgatcaggctcaaactatcaatggtgccaaggttaaaaatccttgatgwagacaatratagcwaagaccrtgaggctggaaagaaatccagagctatttaggaattagaacaggaagaacttcaaaaccagttagatactgacaaggagccaattgctatatcttgaaggaaattgtgcagtctttgtttgttgttgttgtkgtggtggtggtggtggtggttgttgttttgagacagggtctcgctctgttgcccaggctggagtgcagtggcrcaatcacagctcacttcggcttcgacttcctaggttcattatgcttttgggttaatttcttaccagtggtatctgtgataaattacagattgacagggccacctcatcagtaaaggtggctggaagataccaccttggtgagtgagcaggtccaagccccgggctggttacaaagccagctggttctggaagttttgattcctgagatggccaacaacttactcacatgcagagggaaaataacacttagaaagaaaaataagagttttgaaaagagaggggggtgaatgaaaagcctttakggaaactggcttgttactaagacagatgtgaactaaacaagacagacgtgaactaaacaagacagacgtgaactaaacaagacagacrtgaactaaatcaactctctgatcttatggagcaggggaaggggaaaagtcaaggagccctcacacacactcaccacatctcagggcccctggagtcctctgtattaccckcattcatacctccccaactgtaaccatcatcatcatcatagctaaccatgatcatcatcatcatagctaacatttattgagtgatttctatgtgtcaaaaacattagttaggtgctttacataccttttacctcatctgatgccaacrattttgtcayaccttcatatccattattgtgcctgtttcacaaatgagaaaactgagtgaggtttaaaaaatwaacttttttttttttttttttgagacagagtctyrctctgtcgcccaggctggagtgcagtggcgcaatctctgctcactgcaagctctgcctcccgggttcatgccattctcctgcctcagcctcccaagtaggtgggactacaggcgcccgccaccacacttggctaatttttttttgtatttttagtagagacggggtttcaccgtgttagccaggatggtctcgatctcatgacctcgtgatctgcctgcctcggcctcccaaagtgctgggattacaggcgtgagccacggcacccggccaaaaaattaacttctttaccctaggggcagggcaagatggcagaataaaggactccaccaaacatccccacccctacacaagaacaccaagtttgacaactatctactcaaaaggagcactttcataggaaccaaaaatcaggtgagcactcacagtgcctggttttgacttcaaattcctgagagaggcactgaggagggtgagaaggacagtcttgagttgctgatgccacccttcccccatcccctggcagtggctacatggcacagagaatctgtatatacacttgagagagggagaatgccatgactgtgaggctttgcattgaactcagtgctgctatgtcacagcggaaagcaaaactgagctrtactcagctgacaccacggagggaacatgtggaccagccctggccagagggtactcacccagcccagcagtcagagcatgagttccagcaagcctcacccccattggctgcagtgctttgggaccctaagtgaacttgaggagcagtctacgcaacaaggactgcaattcctaggcaagacctagtgctgagctgggcttggagttagtgaactggtggggcacatgagacaccaactgtggtgtctaaggaagtgtttgcaccactccttccccaaccccaggcagcacagcacacagctccaaaagagaccccttccttctgcttgaggagagggaagagtaaagaggattttgtctcgcattttggataccagctcagccacagtatgttagggcactgataaaggctgtgaggcccccattccaggccctagctcccmgacaacatttctggacacaccatgggccaagggagcccattgtcttgaaggatgagttcctatgcctggcaacattcaccacaagctgactgaagttcctttggtccttaactgagcatcagtggtagcctggcagtactccccacgggcctggtgaggctcctctgcctgtgagaatgggatgtaagaatgagaaggactgcatcctgtggtttgagttccagctcagctgcagtagaatagaacaacaggtagacttctaagattttagattcccatccatggctccagatggcatcyctggacccactcaggacctaggggacctcaccaacctgaagggaaggatgtaagcctggctggcgtcaccacctttgctgattgtagagccctagggccttgagcaaataggcagtagccaggtagtggttacagcaggccttgggcaagacccagtgttgtgctgatactccatatccgacccagcacagtcccagtggcggtggccacaggggtgcttgtgttactctacccctggctccagacagctcaacacagagagagagactccatttgtttgggagaaagtaagggaagaaaaaagagtctctgcttggtaatccggagaattcttctggaccttatcaaagaccaccaacgtgatacctctacaagtgtgcaagaaccacggtgytactgggctaggggtgcccactaaagcagatacagcttagatcatagcacccaagtccttttgaatacctggaaactgttcccaaggaggacaggctcaaacaaactcagactgcaaacatggcaataaatacctaactttttaatgctcgaacactgacgaacatccacaagcatcaaagccatccaggaaaacaagacctcatcaaatgaactaaataaggcrccagggaccaacctggagaaacagagatatctgacctttcagacagagaattcaaaatagctgttttgaagatactcaaagaaattcaagataacacagagaaggaattcagaatcctgtcagaaaatttaacagagattgaaataattgaaaagaatcaaacagaaattctggagttgaaaatttcaattgacatactgaagaatgcrtcagagtctcttaatagcagaactgctcaagcagaagaaagaattagtgagaatagacaggctatttgaaattatatcrccagaagagacaaaaaaaatttttttttaatgaagcacacctacaggatctagaaaatagcctcaaaagggcagatctaagagttgttggccttaaagaggaggttgagaaagagatggggtagacagtttattcaaagggatagtaacagagaacttcccaaaactagagaaaagtatcaagatctgagtacaagaaggttatagaacaccaagcagattgaacccaaagaagaccacttcaaggcacttaataatcacactcccaaagggcaaggattttttttwaaaatgatcctaaaagcagcaagagaaaaaaaaaaaaaaaacaagtaacatacaatggagstccaatacatttggcagcagactttttagtggaaatcttacaagccaggagatagtggcatgacatatttaaggtgctgaaggaaaaaacttttactctagaatyatatatctggtgaaaatatccttcaaacatgaaggagaaatactttcccagacaaacaaaagctgaggaatttcatcaacaccagacctgtcctacaaaaaaatgctaaagggagtacttcaatcagaaagaaaaggatgttaatgagcaataagaaattatctaaagatacaaaactcacgggtattagtaagtacacagaaaaacacagaatacaacactgtaactgtggtgtgtaaactacttttaagtagaaagaccaaaatatgaaccaatcaaaaatcataacaacttttcaaaacatagacagtacrgtaagatataaatggaaacatcaagagttaaaaagtgggggaaggcctcacatggtggcttctgcctataatcccacagggcacccctgtaatccaagcactttgggaggccagaggtaggcagattgcttgagctcaggaattcaagaccagcctggatgacatggcgaaaccccatctctacaaaatatacaaaaattaactggcatggtggctcacatctgtggtcccggctactttgggggctgaagtgggaggatcgcttgagccccagaggcggaggtggcagtgagctgagatcacgccatgcacctcacttcagcctagatacagagtgagatgctgtctcaaacaaaaaaaaaaaagaacaaaaagtaggggaacaaagataaagagaaagtctttattagtkttctttttgctttttagtttgcttgtttatgcaagtagtgttaagttgttatcaacttawtagattgtaagagtatttgcaagccctgtggtaatctcaaatcaaaaaacatacaacagatgcacaaaaattaaaaagcaagaaatcaaatcataccaccagagaaaatcaccgtctctaaaaggaaaagttaaccgcttttcccacataacatccaactaaaagaagtagaacctggattcaaactcaggccttctggctctatatcctgtaccagtaaccatgctgctatatttccttccaaaattgtgctcagcaaagggctgcacagaggcagtgactgttctggtgatttctgaagtcctacatgctacctccaatatgcacctggaatgtcatagtcaccaaaatggtttaacacaaatacatccctkcaccacacaaggtcacatgtctaccaacacaaattctttatttcaaagatcagcaacatattttaacttctgcttcctgattttctggcctcttgatttttttcttctttaagaatccaatgcacatttcrtgaggtagctactaaagagagccaggaggaaggaagaattctgctgtgtctactgcccagccccrgctgccagacacagctgcagctggagggaggaatgtgggatttgacggggaagctgtcagctggccagcactgccaggcatggtcagtgaagatacaaagagcgcctggaggacccagccctggtctctgactcctcacaaaggtctccttggggctccctccacccttgcccctcatgtgccttgggatccagcatcaaagtccagaagtgggctcagccagcagccagccatgctcacacactgaagcatcctgactcagctcctggctgccccagcagagcagaacctctgcccgaacttggggtcacctggctcttctctctggagtctcatatcccagccctcagcaaatctcccccagcctcccttccagctacatccagaatgtggccacttctcatcacttccacccctgcaacmctgrcctggcaaccagccttgccccccaagactattgcaaccaccccccggcctgctctctgctcctgccatcattgcagccttcactcttttgcattctgtctcccccagcacctccagatagcacttgctagaggcaggtcagttttggcctctgcacgaacctgacagaggcttcccaagtggctcagagtaaaatcccagtgacagccttggaggcgagggcgtttggtcactctctgaatccacctgccaccacttgcccctggcgacagcagtcccctcactctgcatcagggactttgcattccttgctmcttcagcctgaaatgcccccgccaccaggcatccttgtggcccactccttcaccacattgaggagaagaggagtcccctttctgaaaggtcaggccctgcccccaccacatgcccctgctctgttttcccctgagcatgtgccccactggaacacactgggtcaccacttgccgccaacgcctgcaggacacctctstgaacacccgtgacacctcatggcacctctgctgtcagagcttcactaggactcaccagactaagcagacagktatacccacggccaacacacagcaaggacacagcggggtctggaggggtcagggcacagactcgctgagctctccctcccatgaaggctgcacagagcataccctgcgccctgcatctccccagggaagtagaagctcagagctggggcagaggttggggctggtcacgtaggcacactctctgcccaccacaactaacaagattccagattcccaataggaaagcaggtgttcactaatcacatwgtctgtaaaaacagtcagcaggccggcacagcggggcaggatcctgaaagttaagttcccagatgccagcccagggccagcccctgtcatcagctgtcccagtgaggaggtctgctgtgaaggctcacaagcttcgctgttggatagtcttcactaaaatatgagctccatagaggctttggttttgtttgttcgttgctgtgtctccctggtgcagaatgagtgctccataaacatttgttgaatgaattaaggactgtcaagtataagcccaccagccagtggcagaagcagggctagcacctggagatgaacgttctcccctctctgggtggggctgcccaagccatcaggacctcaccagggccccttatgaccaatggccctgcctcggaaaatggtggaattttcttttttacaaacccaccttccctaatcagggacaaaagctatgatgttggcttcattcacataaagatctaatcgaatgagcttccctggtgtacccccagtaggtcctggtgcaggcgcgggttgctctgtttcttctctgtggtttcgtggaaacaatcccactctctagatcctctcaaattagctctgacaggttgtgactttctgaaagcaaaatatcaagatttagccacaggacatggtgagctgtgacctctggcttcctagctccacctttgtatatagcgctgcccctccttaggcctggacctccttaagaaaggcaagcagcgaacaactgacaggatacggtctttgcccaagtgctatctctaactgtcagcaatcattaattccacaagcgaggaaccacacctcagaaaccaaggtcaccttcagtatggaggggccagccccagccagggagcaggaagagaggtggcaaggcaacagaccccaaatttcaagtgtgacatctcaagttccccagccacagtgcacacaaacatgagcagaaacaatggccttggccagacatggtcactcatgcctgtaatcccggcactctgggaggccaaggcaggaggatcacttgaggccaggagttcaagaccagcgtgggcaacacagcatgaccccgtctctacaaatatatatatgtatataacaacagacttaccagcttttctgcacaaggattctgttcgcctcagctttcccagtgcctctctagagggcttctctatctcctctgtctctataggattcccacaagcccctcttcacccccacacttctctagaagcgcatagggaggttcctcactctacctcctccttccagacacaccacctgcccttcctcagcacagcgacacaaaccgcaccccactccccgcatcagccctgaccttttcccatgttgggaaacacaccacatctcagttcaggactctgctcctacccccactcacactcccactcccacccccgcccctgcccagtgtgtcctcttcctcctaagtccctcgtgtatcgcaaaaccccacacaggctctaccttgtggatcctcggggcagcagccccccagggcacagggcttggaattcactcactggccaaggaccatgctctctgcaatgaggcaggtaaagaaggtgtgctgggttgcatagcatccccctaaaaattcatgtcctccctggaacctcagaatatggtcttatttggaaatagggtcgttgcagatgaattagttaggatgatgtcatactggagtagggtaggccctcaatacaatcactggtgttcttgaaaatagaggtactgagacaaggaggacgccatgtgaggacagagattggagtgacatggccacaagccaaggcactgagggacaccaaggattgctggcaacacagaagctggaagaggagaggaaggaccctcttcttgagcctccaaagggagcatggccctgcctacaccttgatttcacactttaggcctccagaactgtgagacaacccatttctgttactttaagcccctgtgtgtggtcctctgtgacagcagccatggaggctactgcagaggggatagagtcccaggacttgggggcttgcagtcttgaggggaatctccttccaagcccttgcaggacaggcccttgggcatcaatgtgttgcacttactctgtgccaccttgtaatattaatccttctatgtacatgttatgggccccgttacataaaaaatgcaattctttctggtgtgcttcagctccctgcctacacgcagtgttcctccctgccctcactgcatcctccaggtgcgggacctgtggtggttcctgtcctcagccacatctaccctggtgtgaggacctgtagtcactcagtctgtctcccaggcctttcttttatttatttatggacgtccattgcagaactgaattaattctacctcagtgcatggatgtcgtcatcactggcccatacaagtcctctctcttgtctttctcacgtgtgtatgtatgtattcccactcccacccccgccctcacatccattctaatgtgtatccactcttgaaagcgggtggcttggtgtgtacgtgtttcctgttgtgtaatggcatcgtgctatcactcatcctgcgtcttccatgatcctgagatcccttctcaggagtggctgtgtggacatccatgcctttgcacccgccaactgcacaacaccccatggtgtgcagtgaccactctcctgggggtggcaccccgatggcctccagctccccagcctcacagccacttgtgtctgcatcccacctctaggcctgggtgagaacctctttgacatatattccaagagacagagttcctgagtctggagagcatgcaattctctcatttgcccacaccctgcaaagtgccctccagaatggctgtgccatcaataaccccttcccacaaccacacataaggtccccgtttccccacatctctgtcaacacttggcatcatccagctttcccatgaaaaattatatctcgttgttgaatgctttgcatttttctagtaaccactacatttgagcatctttccatgtgctctttagccctttggggtgcctcttctgcaagttacccttgggattctttaccaggtttccatggggactgctgcctctttctgaccgatttgcaagagctccttgtgtattmtagatattagtcctgtcactttttgaaaacagctttattgagacacaccttacaattcacccatttaaagtgtataattcaatgcattttagtacattcacaggtacatgcagccatcaccttcaattttagaactttttaatcacctcaaaaagaaaccccataagcattagctctcaccccatccctccatcgcaccccagccctaagcaaccactaatgtgcttctcatctgcttgagagatttacctaccccacacgtttcatataaatggaataatgtggtcttttgtgactggcttctttcatttgccgtagtggttttaaggttcatccacattgtgtcatgtaacagtgattccttcctttttatgactgaatgatgttccattgagtggatagaccacattttgttgactcatttatcaatgcagagacatatgagtcgtctccactgtttggctattgtgaataacactgcagtaaacactctggtacaggtttccccatggacataggctttcctttctcttgagcatatacccaggagtgggattgctgggttatatgataacaacgttaagtcatttgaggaacagccagacagttttccgaagtggctgcrtcatctcaccatgaactgcctgtgaggcttccagtttctctgcctcctggccccacctgttattaccttgcttttgaattctagccatcctagtggatataaagtggtatctcctggtggttttgatttgcatcccctgatgactaatgacattgaacagctttccatgtgcatattggccatttgtgtatcttcgtgrggggaatatctattcagatctttggctcatttttaattggattatttgcctcttattatggaattggaagagttcttcttacattctagatataattttcttatcagatatataatctgtgaatattttctcccattctatgctttgtcttttcattttcctgtgggtgtcctttgaagcataaaagtcttttaatactgatgatgtcaatttatctatttttttttctttggttatttgtgctttgaggtcacatccaagaattagatgtaaagtcaagcagatttactcctatgttttctttttaagagttttacagttttagctcttacatgtatgtctttggtccctttcgagtccgtttccgtgtgtgaaagggtctaactccatcatgtgcatgtggcccctttccctttaaatctttgcaagtctcttttctcgatccatcctcactccattaacttygtcgcagtttcctttgtggaatggaaacagattgtagtcctcaaaatcaggttgttcctgaaactctcttctaatccaaatccccccaattctctgcggagttggtgagcccataactgagaatacataactcacagtcctcttgaacactgagggtgaaagacrttagcattcattgtctttgtatcaatcatcattttaacatggaaggcaaatccccttcctcagaaacaccaaagaccttctggaattgcaagcaagcttcaagttgactaagtgtgttcaccttccttcatctagctgccagtgcacactgaaatggcttgcattgcgggcagcaggaaggatgatgatgagaaatacaaaacccctataaccacaaagcggtgtgcaatccctgagcaaccaaaccttggtaatgggggatgatgaccccttggcactcctgagccacgaacttttcctgactctattctttcctttccaactaggagttaccccggtcaccacgttcgcccttctcaacctgactaagtggkcgttagcactgtccgcccactgcatgggcactacctgccccagtgtcctctcccctctccgctctgtgccatagccttagctaccctggccagctttctcccagccaagtccttcctcctttctgaatctggtcagggtctcaaagatcgttaaaaagccgccaaagtttgcaactcgtcttgagtggctgctcctcccaaacggttctgcctctggtgtcttgttctaggagcggttgaattctctgttttgctgtgggtgccagcctctatcagcccctgccctggtccatctgtcagcttcaggtaagactaccggctaggaaatggccccttgtccttatctctgcctctaaaatatgccacctaaattaacagatcgtggcattgcatggctcgtcacagagaagccaaggcaaattcttgtggaaggcggcacttgtctggaaacagactcaggacaagtgtgytgcacagccagcttcctcaaacccactctcgccactgtagctgcccacagaggcacctcccaagccataggcccctcctaggccagctcaggcctcaccttgtccctccctgcagggyggggtctgattgacttcaagaaggagtcagagatcagcttaagggcaaaggctggaagcagagcgaactgggagcagagcacacaggtgcgttctgatgggtattcgggagagtcaagaaggggctgacctggaggacagaaaagcagtggaaggagggcacagagtgaggggcagaagaaacaggacacagagggaggagggccaggaagtgagggcgggagcccagcacatcacagaaggtgcccgggtgcttggtggcaggcaacagccggccagggtggagtggggaaagctcagagaggagggtgagcagggagagggcttgcttcctgttcctgcctggaggtctcaccagccaccacccccactgccactgcacatggggacagaggtttgtcctggggaaagcaaaggtctcttccacatctttctccttcctggaaaagcaaaaagaaacgtgggtataagaggttgtaaaaaaggagacccagccgtgaaaggacatggaggtaccctaaatgcacactgccaagcaaaagaagccaatctgaaaaggctgcagactgtaagattccaaatacaggacgttctggaaaaggcaaaactatggagacaataaaaagagcagtgattgctagggtttcggaggaagaggtggagcacagaagattttgggggaggtggaactattctgtgtgatattctaatggtggatccatgtcattgtccgtttgtccaacccatagaatatgcagcagcaagagtgagtcctgatgtaaactgtgggctctgggtgagagtgatgtgcaggttcatcagccacaaatgtatggctctggtgtggatattgatagtggggaggctgcgtgtgtaggggctgtgagtatacagaaactctcagtacctttcgctcaattttgctatgaacctaaaattcctctttaaaagactcctatttaaaagactttaatagactttataaagtttgttaaaagacttttaatagactttttaaagacttttaacagactttataaagtctattaagaaatctattaaagtctatttttaaaagtctattaaaaaaaaagtctactataatcccagcactttgggaggccaacgcaggaggatcacttgagcccaggagttcaagaccagcctgggcaacatagtgagatcctgactatatatatatatatatatatatatatatatatatatttatttatttatttatttaagtctaataagaagtctatttggggccaggcctggtggctcatgcctgtaatcccagcactttgggaggctgaggcaggtggaccacttgaggtcaggaattcaagaccagcctgaccaacacggtgaaacaccatctctactaaaaacaaaaaattagccgggcatggtggtgcacacctgtaatcccaactattccagaggctgaggcaggagaattgcttgaacctgggaggcagaggtagcagtgagccaagatcgcatcactgcactccagcctgggctacagagcaagactgtctcaggaaaaagaaaaaatagtctatttaaagaagaaaaaaaagaggcctggccaatatttaataggagaacacaagaactcacctcatatccttcctgctggctctgggttccgcctgcagcccctgcctcacctgctccctccaggtaagcagggcctccgagagcccaagatcatgtgggttccagggtcttctgccagcaccagagggcaagacaaggcaactagagggacatccccatgagaggccatgaccatggagcaaaacgagggcaaggggagagccctcggggagaggggcatgggaaagggagagaaggacatctcagatcagcctttaccgtggcctccagggctagagagccctcgggtgatggaacaggcccagccaacacctttcatttgtctatgaatcaagaactgcccatcgtgtacaaattaaatacaaagtgctaaggggactagtggagaagtatgttagttggggccaaaaacagcattcctcggcagtgcggggtttcagctgacctcaaaaggtggcaaaggatgtgacactggcccagagtcgggtgggaagggacaatgtgcagctgagcttctctggaggaaaaaagccacgggaaaacagggcctctagttaacacatgggttgtgttcccaacgcttgtgcttcggaaatgtgatgtgtaaatgcattttccaaaaacaaaagcaagaaatgaaaagcgctcatgatggtcaggtttcctcagtgggtcactccacgatacacccaaagtggagctgctgcacctcagttacacctcacaccctgtgccgccgactttccaggtgaaatcctcggggcctcccttgcaggcagcctgggccccctgggaagaggctgggccaggcagaggtctgagacaggagtggattaaccctctctgctacctgtctgtctgcacaggagaacgagttttctccaggtttacccccagggcttctgatttagggagcaaaaggcaactacctatgaaaatatgaaaacaaggatctctcagagtccaacccactcatgcatccaccttataaatcaagtgtctgtgcctcaggcactgcttgcaggaagtgaaaagcacagctgagacagggaggaatcctgaagcggggctcccagctcaacccagagccttgaggaagggggtgcaaggtggcaaaggcagtgcttctgtagggaaatttcacggtgacggcagccttccagggaggcccacatcacctaggaggacaagttagggtctggagaaactaaggctgggagacagctccagccagcatctgtagcaacagcgcaacaggcaagagtaacagtctcccagagactccgcacacagcacatgggaagacagagctgtggccaccacgtctcccagccctgcaggaggctcacagctacaagcacaggattttacagctgcttggggaatggggttatgaggtgaagaccctgacccaccctccctgagaaaggaaaaggcatcttcctaagatgaaaccctccctgaggtcccctcctagtagccttgggtggacaagagaggtgaatggggcacaaagaaggctaggcaggactgggcacctctacctcacccccaaagccatcagtctgcagcctagtcacacctgaatcactctacattgcgtaaaactttaaatgggctggtgtygatagcctgtatttaacaagaagagcagctaacrtttctcatgtatttcccatatggcrgacattgttacaaacactttatatttactgtttaattgatttctctccacaaccctaggagctaagcactgttgtcattattttcattttawaactaagaacatgaaggcccagagagtttaagcagcgtgcccaaggccacacagcaagtcctagtggcatgagtcactgggacttgactcagacagcctgactctagagcctacctttgaayttctacactaaatttcaaaatctgtctacctaaaaggtatttcgttgtgtcagaaatgtagttttgctgttaatacaggtgtcttcttctccaggacacaagaagcacctgggggcatgtgcaggggcccagcctggcctctgtgactcacggcacccctggctgagataatacacaaaaacaagggtgttcccctgagtaaggaaggctgcaggactgaaggacatttacagaggagtgaggagagggcagaaataaatggatggatgcacaggcagcggcccgacggckctggggactatgcatggggccccagctgccccaggacagcctccagcttggggcagggcaaggggaggaagctcagtccatgggaaaattycatggycctaacctgagggaagcccatctctgcccataagacaactaagttcatctcctctattgcattccagagccgtggagcgagagatgccggccctgggctgggccgtggctgccatcctgatgctgcagayggccatggcggagccctccccggggactctgcccaggaaggcaggggtgttttcagacctaagcaaccaagagctgaaggcagtgcacagcttcctctggtccaagaaggagctgaggctgcagccctccagtaccaccaccatggccaagaacaccgtgtttctcatcgagatgctgctgcccaagaagtaccatgtgctgaggtttctggataaaggtgaaaggcatcctgtgcgggaagcccgtgccgtcatcttctttggtgaccaggagcatcccaatgtcaccgagtttgctgtggggcccctgccagggccctgctacatgcgagcactgtcccccaggcctgggtaccagtcctcctgggcatcgaggcccatctccacagcagagtatgccctcctctaccacaccctgcaggaagccaccaagcccctgcatcagttcttcctcaataccacaggcttctcattccaagactgccatgacagatgcctggccttcaccgatgtggccccccggggtgtggcttctggccagcgccgcagttggcttatcatacagcgctatgtagaaggctactttctgcaccccactgggctggagctcctcgtggatcatgggagcacagatgctgggcactgggccgtggagcaggtgtggtacaacgggaagttctatgggagcccagaggaactggctcggaagtatgcagatggagaggtggacgtggtggtcctggaggacccgctgcctgggggcaaggggcatgacagcacagaggagccgcccctcttctcctcccacaagccccgcggggacttccccagccccatccatgtgagyggcccccgcttggtccagccccacggccctcgcttcaggctggagggcaacgctgtgctctacggcgrctggagctttgccttccggctgcgctcctcctycgggctgcaggtcctgaacgtgcacttcggyggagagcgcattgcctatgaggtcagcgtgcaagaggcagtggcgctgtatggaggacacacacctgcaggcatgcagaccaagtacctcgatgtcggctggggcctgggcagcgtcactcatgagttagcccccggcatcgactgcccggagaccgccaccttcctggacactttccactactatgatgccgatgacccggtccattatccccgagccctctgcctctttgaaatgcccacaggggtgccccttcggcggcactttaattccaactttaaaggtggcttcaacttctatgcrgggctgaagggccaggtgctggtgctgcggacaacttcaactgtctacaattatgattacatttgggactttatcttctaccccaacggggtgatggaggccaagatgcatgccactggctacgtccacgccaccttctacacccccgaggggctgcgccacggcactcgcctgcacacccacctgattggcaacatacacactcacttggtgcactaccgcgtagacctggatgtggcaggtaggactcaaagcgagactctcccgttcaaacatctgcatccagccaataacttaaactcccaggagacggcactataactccctggtggtggaaagttaggagcatttgccaagcctgcttctgtaaaacctaaagctagaaatttgtgtgtccctgaaaaatggtgaaagcgaacagtgccgagggttgccctggatgcaacagtgtggaccctgtcctgaccctggggctgtgcatggggcaagggaggggacggtgcctatgagggtaagaaatgtcactgtctagcgctttgagatggagtgtagtattgtctgggaatattcagggtgtctcctggatgatatcaccataaaagaatggcatgggtagaataactaatgctgccagacccaacaaggccaccaggaccacaygggcggctcctacccctcagccccagtcacctctctggacagagcctcccatgcctggagaaaaatgggtgcccctgctctaggattgcagccacagcagatgggcatgagcacagctcttgagaggaacttcccagagtggtaatggaatcaccacagccgcccagggcatcccccaacatcccggttattcaagacagttggctgttggatgtggtggaggatggagatcctggggtagaatgaggaggtttcagttctgrcagcttgattctcgttctccttctccctgcatacctccaggcaccaagaacagcttccagacactgcagatgaagctagaaaacatcaccaacccctggagcccragacaccgcgtggtccagccaactctggagcagacgcagtactcctgggagcgccaggcggccttccgcttcaaaaggaagctgccyaagtacctgctctttaccagcccccaggagaacccctggggccacaagcgcagctaccgcctgcagatccactccatggccgaccaggtgctgcccccaggctggcaggaggagcaggccatcacctgggcaaggtgaggaagacccagrgggcctgggggagggtcagtggcttccctcagtgtgtgtgtctgtgtctgtctgtgtttgtgtctatggggttcctagtctatgtggatatacacatatacgtatgtgtatatctgtgtgtacaattgaccctgaacaatatggggggtaggggtgccaaccccccaaagcagtaaagaagccaagtgtaactatgactcccccacaacgtaactacgaatagcctactgttaaccggaagccttaccactaacagaaacattccgtgaacacatattttgtaggttctgtgtgtcagatactgtgttcttacaataaagtaagctagagaaaagaaaatgttattaataaaatcctggccgggcacggtggctcacgcctgtaatcccagcactttgggaagctgaggcagacagatcacgaggtcaggagatcaagaccatcctggctaacacggtgaaacctcatctctactaaaaacacaaaaaattagctgggcatggtggcaggcacctgtagtcccagctacttgggaggctgaggcaggagaatggcgtgaacccgggaggcggagcttgcagtgagccgagatcacaccactgcactccagtctgggcaacagagcaagactagttctcaaaaaaaaaaaaaaaaaaatcctaaggaaaagaaaatatatctacaatccattaagtgggagtggctcatcccaaaggtctttatcctcstctccttcactttaagtgggctgaggaagaggaggaggaggggctggtcttgctgtctcacggtggcagaggcggaagaaactccaaatgaaagtggacttgtgtgctgggygcaggagctcacgcctgtaatcccagcactttgggaggccaaggtgggcagatcacctgaggtcaggagttcgagaccagcctggccaacacagcgaaaccctgtctctactaaagatacaaaagttagccggrtgtggtcgtgggcgcctgtaatcccagctactcgggaggctgaggcaggagaatcacttgaacctgggaggcagaggttgcagtgagccaagatcgcatcactgcactccagcctgggtgacagagcaaaactccatcaaaaaaaaagaaaaagaaaagaaaagaaggaaggaaagagagagaaagaggacccatgcagctcacacctgtgttgtgcaagggttgcctgctgttctgggcctgtgtctctgtgcatttggggaggggggcggggaggactcctgtgggtcacctgaacccggttaacagcagcccgtcctgctgactcccaggacagatgatctstcatcttggggaaggcaatcatcttcctctattctgaccctgaggctgttccctgggcaggactgaggggggccagcccagggccctgagccaagctgcttcgcctrtgcctggcagktaccccctggcagtgaccaagtaccgggagtcrgagctgtgcagcagcagcatctaccaccagaacgacccctggsacccgcccgtggtctttgagcagtttcttcacaacaacgagmacattgaaaatgaggtactgccctgtccccagccctgcccrgtgctggccctgcctccttccagctcagcccaggaccatcctcatcaccatcagggagtcccaaccaccctttgcccagatctgtccccagtcgcaggagctgtgccttgctgtgtggacggcaagttcagaggtcacaacagagctgctcatctctttaaaaaggggctggagaggaattcagcaagtttccaggcagaactgaaaatgaccaaaggctagagtggcctccagtggtcagtactcagccctgcccactgaagcccaccctgtctcctgcaggacctggtggcctgggtgacggtgggcttcctgcacatcccccactcagaggacattcccaacacagccacacctgggaactccgtgggcttcctgctccggccattcaacttcttcccagaggacccctccctggcatccagagacactgtgatcgtgtggcctcgggacaacggccccaactacgtccagcgctggatccctgaggacagggactgctcgatgcctcccccttttagctacaatgggacctatagacctgtgtgaccagcccccagttcctcccccagttcctcccaggaagcccaggagcctcactggggcagacaataaacyctcagagcctcgctctgtgtgctgcttcttgcggggaggcacagggccatgtgtgtaggaaacacacgaacagacgtgcacacacacagacgtgcacacacacacagacatgcacacacacacagacgtgcacacacacagacgtgcaygcactcacacggacatgcacacacatggcatgtactttattcacactggtctactgcagtccagaaaagccaccattactaacaaaaaggaagctcgctgaaatcctgcacctatcagattgtttttttaaaatctgagactggccaggcacggtggctcacgctggtaatcccagcactttgggaggctgagacgggaggatgggaggatcacttgagtccaggagttcaagaccagcctgagcaacacgctaaaccccatctctcctaaaaaatacaaaaaaaattagccaggcagggcagcatacgcctgtagtcctggggcagagggggttagataggaagatctcttgagctgagaagccgagatcacgccactgcactccagcctgggcaacacagacacagtgagaccctgtctcaaaaaaaaaaaaaaaaaaatctgagagtgacaactttctcttggggaggctgcaagggaatttcccagtgtcagtgacaggcttgcaaaatggcacaaccatagagaagatgctacagggagatctagcaggatcaccatgcctttatccattggcacactggcccaacctcagggggtttatccccaagatccacctgtaaacacaggaacgacatatgtacaaagtgattcattgcagcattgtttgtaacagcgaaagtctggaaacaaccaaattctcatctgtagaaaaccccaattgaatgaactgtggcacaacctcacagtgcaattctagctgattgtaagagaaacacacgaatgaggatactctgtgtgctgatagggcaaaacttcaggccatagcaagtaagaaaagagaagaggcatagaataatacagacagcatgctaactttgcatgagaaaggacaggagtttccctagactggtctccatgtagacgacagggaagcatggtggatgagaacagggataggagcaggctttcttcatggaaacctttctattgagttgttaggggttttgttgttttgtttgcttgcttttggggacagaaggggaatgatggagagggccgggccacgggctggccaggtagggagatagaggctggggagaaagcagagtggcctggccagacgctatggggatggggatggggcaaggagggtctcctccctccctctggagctgagggagccccaagtgtcccggccatggcacatggcccaggaaagcactaactgcagaaacccaggtgccacagcctctcgccccagtgctatgttatttttatttttgaatcgtgagaatgtattacctattcaaaaaactgaaatctaaattttacaagagggaggaagggaggaaatgagggagggaaagagagaaagaaaaatgaaactctaattgctgatgtgtggtactatagtagctggccaggatggatggggtagatagaataatgccctccaccccccactaatgatgtccacatcctgatccctgggacctgtggatctgttaccttacatgcactaggaaggaattctgtgggcatgattaaggtaaggatcttgagatgggaaattatcctggatcatccaggtgggcttgagtaatcacaaggcccttgtgagcgggagacaggagagaagagaggagagaagatgccacactgccggctgtgaagatgacagaaggggccacaagccaaggaatgtaagcgacctctagaaactggaaaagacaaggaaacagattttcccctagagcctccattaggaacaaggccctgaagacctcagatggtaagagaatgcaatggtgttgtttgaggccactaagtttgtggtactgtgtttatagcagccacaggagctaatacaatggatgtggagttttctatcatggggaaccactgacagaggaaagcagacaagcgaacagatgggggatctcacactgtccctcccagccctgctcagagctcagtcacccacagccagccgcagaaccaggaaccagtgacagggaggcaggaacaggggagtcaggtcatgtggggcagggtcctggatcttttcaaactggacaattcaatagaacagattccagcctttctctccctccaagaagacagaaaggaagggtgtgcgtggttttgataaacatttcaagggggtgcaggacaccagaggctcaggggctcctttacacactgagatgtgggtgtatgactgtcatcacccaccataccaagggcagctagaagaccaaaggcattgcttactttacctgggtgatttttcatagttgtttgttggtgttgtgcattcagcgggcactcagcagtccttgttgagtgactaacggctgagagcctcagaaatacaagcctcaagtcacattctcacttccctgccctgttgagtctttgcactttgccccacataattattctggccattcctgtggccaccacagtgccatctcccaacaccatccacccctaacaagatggcagaaggacctgacttcacccctgagaaagcagccccaagaatcccagggccccttcccttcctcccaggccccatctctaatggtcctaacaggtactactttccccctcctcccctgaggccccggcttctacttttcagcatttctcactgttcctccttcccttaagcagaatgtaactggcctgggacacaaagacaaggaagatgaagtccccgacctcaagatgtccacagtcacaggggtgacagcccagagcgacagacagggagggacagacagggaagcctgagggctcctgtaccgaggcggggatgtcctcggatgctcatcctctgtttcctaataaaaactggaagtactcagaaggctgaagcaggaggattgcttgagcctaggagtccaagcctacagcctgggcaacattgcaagaccctacctcttaaaaaaaaatgcaagcctggtctaaccctcaagtaggcagagcttggtccccgtggactcactcaatgattgtccatgtgcgactctgccattcccaagcacatagcctccccaggcctggaaggtcagctctgcctgggtggtgaattctccctgagcaccacgtacactcacgtgagagggctactgtccctgttgtctgaccctcctcaacagggagaactgagagcagcaggtattccccacccaagtcccaactatgacccaagagtgggagacccagaagacaggcagttcaggaatctccatgatcagcctggctcacctctgaaaactcggatgccccaagaatccctgagtggagatggacggcatggcccaggcagccagtgggccttccctgagagtgactgaccagcactcatagggcataaataggacaaggtctctgttagctggtggagctcagtaagagtgatgtcaaccaagaagtcctggggcttggagttgtttcatcaagactgctggtggcctctgcctaaacctccagttgggccagtggaccaagccctccacaacctgcccctctacctttgggagcctttaaacctttcctcttaagctccctgcagaaccattccctctgtcccttcaatgtaggaggagacctcagctaacatctaacccagagctcactctgatgcagacccctgcacgccaggaccggcacatagcttgtgggcctcaaatgataatgcaagcccttgtttcaaaattattaagaatttaaaggtgttgacagcagagagtgaaaccccaggctaagataccagccccaaggagctggtcctgccgtctgctcccactacccacctcggccatggccctgaggtggcagctatttcctgggctgtgtttctaatagtaatgcattgcagcaagagagcacataatcttctcctcaaagcatgttctgcttctcaaaagcaaataaatatgtattaaatcaatatgccagttatagtaaatgtttcatttaccaccaaattcaagcttatgcaaattagagcaattgcacacttaaccctaagttatcttggcagtaaacatttttacaaaaaatacgtgattagctaaatgcttttctcaactgtaagttcctgagggactaatcctaaactcttggccaactacgagctgtttctcagaacatatatactaattgtctcattaatctctcctcttaatttgctgtgcctctcccagttagggggagacattcataatttttggtcatacatttggtaattgacctgctactttggactgcatggattccccatcctggggccacttcaaggtggctacatcccataacctggaatttctaatggctaaggccaggatgaacctgatatctcatgaaaacatatcaggtgtataaagacaaaataccatttgacccagcaatctcattactgggtgtatgcccaaaggaatataaatcattctattataaagacacatgcacacctatgttcactgcagcactattcacaatagaaaagacatggaattggccaggtgcagtggctcacacctgtaatcccagtactttggaggggccaaggcgggcagatcacaaggtcaggaatttgagaccagcctggccaatatggtaaaaccccatctctactaaaaatataaaaattatccaggcgtggtggcaggtgcctgtagtcccagctacttgggaggctgaggcaggagaatcgcttgaacccaggaggcggaggttgcagtgagccgagatcacgccactgcactccaatctgggcgacagacatggaatcaacctaaatacccatcagtgatagactggatgaagaaaatgtgatatatatacaccatggaatactagtctgccataaaaaaagaatgagatcatgtcctttgcagggatacagatggagctggaggccattatctttagcaaactaacacaggaaaccaaaataccttatgttctcacttataagtgggagctaaatgatgagaacgcatagaggagaacaacacacactgaggcctgttggagagtggagggtgggaggagggacaggaccatgaaaaataataatgggtactaagcttaatacgtgggtgatgaaataatctgtgtaacaaacccccatgatgcaagtttacctatgaaacaaacctgcacatgcactgtgaacttaaaagttaaaaaaaaaaaaatattaggtgtagatgtctgatccaagaacttagtcaggatgttaaaaggttgcctgctaaaccctcatgcttatttgctagagcatccaaggattggtttgcaaaactcacaagatcccccgtcactgcctgagagctgattccacgttacagttatccattgctacataacaagccacctcaactcagtggcacaaaacaacaactattttattatgctcatgaactcaatgggacaaggattcagacaggacaccctggagatggcttctctctgatccatgatgtctggggcttcagctgggaggactcggaagctgatagcatcttggatgctaatactggaggcagcaattgtctggcagctttttcccttacatgtctggcatctggactggtctgtgctcaactagaactgtagaccaagcacctatgtgtggtctccccacggggctggggcttcctcacagcatagtggtctcaagtaatcagactcttgcatggaggctcagggcttcaagatgggtgttctcacacacaagaaggaagccgcatgccttttatgacctaacttcagaaatcccatgactatttctgccatactctattggtcagtggtcaccattgcacccaaatggaaaggaagaa

SEQ ID NO: 94233 - DNA, 33190 bp, Homo sapiens
tgtgtgtgtgtgtgtgtgtgtgtgtgagagagagagagagtgcacgtatgcatggatgtatgtgtgtgtgtccgtttgttcaggctgctgtaagaaaacaccaaggaccgggtggcctaaagacaacataaatttatttctcacagttctggatgccgcagtctaagatcaaggtgctggcagattccatgtctggtgaggacccacggttcatagacagtgccttctcactgtgtcctcacatgatggaaaggtctggtgaggacccatgttcatagacagcgccttctcactgtgtcctcacatgatggaaaggtgagggatctctctggggtttttttcttaagggcacgcatcctattcaggaaggttcctccctcacgatctcaacacctcccaaacaccccgcctcctaacaccatcaccttgggggctaggatctcaacttatgaatttgtggggaaatcaaacgttccccgaaacatttgtgtgtgtaagagagtatgcatggatgtatgtgtgtgtgactgtgcatgcatgcatgtatatatgtgtatgtgtgtgcatgcatgcatggatatatgtgtaagaaagtgtgcatgcatgcatggatgtatgtgtgtgcgtgtacgtgtgtatgtgaagatacctcctgagccttcggtttgacacaccccatgtggtctgtgcaggaagcagggaggcgcagatttgtcccaatctgctcctctgggggtgggcccaaatgagccaccttgggaccccagatggctggtgtagacctaccacccgatgccgttggctcctttcctatcccctgggtctccccctcccttcgtggtgtctgatcccacgattgtgctgaaatcgctcctcctcggctctctgctgccctcatgtggctgtctcaagaagggctggggctaccgggggcgcccaggatcaacacaggagccccttcagaccggcaaccgcgtccacagcccggaaccctcagcatcccagaagccgccccaacgccctcaccaaaggctcagcaccaattctgcaatctggaagctgagcaaatctctccgccccccagcactcagcatgagttacatcctcgggagggggaggcctggcggcagctgctccccgcccctctcccgctgctcccgcctcccttccctcctttccccgctccccacccgtccttgccagcaggcaggaaggaagctgctcatagtgcaagggtggggtacttccagctcacactgaacagccccgggctgggctataaagagtcagggacttccgctcagtcacccctgccctcaccacccaggcccccatgcacacaccccaggcccaaggccttcccttcccagcacagccctccaaggtcaaggcgtcccccgcccagccctgcagagcactctggtctgagagggaaggcaggggcaagatttgccgcctctttggcattatggagggggcagggggcacagggcacagccctccccagggagggatccctactcacccacagaaggctgtcaccttacccctggggtctgggccagccctccccgaggcggaaacacagccactgtcagggacaagggggctcagttcccaaccagatcatctccaaagcccattcagcttcagatctcatgattgaagatggaaattctttcagccgaacaccaaatctccaaccttgaaaactgttttttcggaaagtcctctttaaaacatggttaccaatatgagcagtcagccactaagatgcatgggcatcattcttggcagggctgcaggcatagagcaggccagcaccaggcagagccctggggacggcaggcctcctccgacaggcgggggaatcaactgttctcatcagagcaccctgatggaaggcaggacactccggacaacactggccacggcccaagaaaggggaagcagggaatcccctgtccagagagcattcatctctgactttttctgtctgtttaacttttttttttcctccttttcttaagaccctgccatggcatcctctgccccaattcaaacccaatccaggcctactctgaccctcagctttcagcgctgactgtactgaactggaccccatcctccctgtgaccctcagccttcagtgctggctgtactgaactgtaacccatcctccctgtggccacagagtgctccttcttgcactcctccccttcacctagactgacttctttctgcccacacagacccatctagcctcagccaattcccttctcagtggaccctctccattgcctccagagcacagcttccagtccccaggcggctgcacacatttgcaacaaaacaagccaatgtatgaagcaatcccactcagtgcaggagctcaacccagcagaggatccccacagagaggaactgacctgtgtcttccagagcacacaggttcagagcacacaggttcatttaagtgagaacccacacttacagagcaagctgcccaaaaaccacgaccaggagggcccagagaaagagctgtccccggggccttgrggacagggtgacagccacccagagatcatggagaaggggacgtaaggaagacctcacagaggagtcatcctgcgactgtgttggttgggtccttcaggaagcagagtcccaggagttggaagcataagaggaatactgcgggcaatgcctgagaaagataacagggaccgggagcaggagtgagttgggcaggggaaggatcaggcccacaatgccaggctcacacctgcagaggagggaagaagaagaagggcctcacatcagcccagcgggggatgttacgcccacagacgccccggggctcagttactgtctaagtgttagaaataaattttcggtgccacaaaagaaatagcactcagatataaatgttcccagcaaggcaattttacttctatagaagggtgcatctcacagatggagcaatggcaagagcacacctgaacaagggaagggaaggggtttttatccctaaggcaggtagcccctacagctgtgttgttcccctattggctagggttggaccacaccgtctgagctaattgttactggctattttaaagagagcaggggtaagagccggattggcagggtaagtagtttggcaggaaggacggtcacagaacaggtgactcaggatgactcaggtcagagcaggtgaccagtggtgactcagttcggagcaggtgatagaagctaggagggggttgtttactgaaactaggggcaaggagacgaagagaacatgaaagttaaactttaagatgaagaacaaagctgaacatactgatgcattggatctttggagaggatctcagaactcattgtacttaatttacaggctaaaaccttagaagaggaatttattatatcctacacaagactccagggaagcacatggccttggactgaaggctggcatctggaagctgtcagccaccagcaccttctgcagcaggtacctgctctctaagagggaggcctgggtggtgcacctccagagctgcccaggctgggcctcaaggaagaaaaagattttcatttgtcagaggcggaagggagaggtggagggaacagcacagcagcggcccaggggcagggaagcacaggaccattagggagacacgagaaagcccatttgtctagaacagaggattcaagcagtgcaccaaggaaaatgagggccaggccaatgtgctggagtggctttgttcttggctgagggttttgggtagtgccaaagcgtaaggtaagccctgctttccagaagaatctagcagagtgtggagcccagatgggactggaaggcctgggaggggtcaggtggccacagggacgggccacagccagtggtgcaggcaagaagacaatggccatccatggtggctcacacctggaatcccagcccattgggaggtcgaggcaggtggatcacctgaggtcaggagttcgagaccagcctggtcaacatggtgaaaccctgtctctaataaaattataaaaattagccgggcgtggtggtgggtacctgtaatctcagctactcaggaggctgggtcaggagaatcgcttgaacccaggaggcggaggttacagtgagctgagatagcaccattgcattccagcctggacaacaaaagcgagactctgtctcaaaaaaaaaaaaaaattagccaggcgtggtggtgggtgcctgtcgtcctcgggaggctgaggcatgagaatcactccgggaggcagaggttgcaatgaaccaagatcacaccactgcactccagcctgggtgacagagcaagactctgtctaaaaaaaaaaaaaaagacagaaggatgtcagcatctgatgctgcctgtcaccttgaccctgaggatgccagtcacagctccattaactgggacctaggaaaatgagtcatccttggtcatgcacatttcaaatggtggcttaatatggaagccagacttgggttctgttgtctcctccagcatggtagaagatgcctgaaaagtaggggctggatcccatcccctgcctcactgggaaggcgaggtggtggggtggggtggggcctcaggcttggggtcatgggacaaagcccaggctgaatgccgcccttccatctccctcctcctgagacaggggcagcagggcacactagtgtccaggagcagcttatgaggccccttcaccctccatcctccaaaactggcagaccccaccttcttggtgtgaccccagagctctgagcacagcccgttccttccgcctgccggccccccacccaggcccaccccaaccttatcctccactgcttttcagaggagtctggccaacacaaatcctcttgtttgtttgtctgtctgtctgctgctcctagtctctgcctctcccagtctctsagcttccgtttctttcttaaactttctctcagtctctgaggtctcgaaatcacgaggcttcgacccctgtggaccagatgcccagctagtggcctttctccagcccctcagatgacacagaactacaaaccccagcatgcactctggcctgaagtgcctggagagtgctggtgtaccccacctgcattctgggaactgtagtttccctagtcccccatgctcccaccagggcatcaagctcttccctggcyggctgaccctgcctcagccctagtctctctgctgacctgcggccccgggaagcgtgcgtcactgaatgacagggtgggggtggaggcactggaaggcagcttcctgctcttttgtgtcccccacttgagtcatgggggtgtgggggttccaggaaattggggctgggaggggaagggataccctaatgtcagactcaaggacaaaaagtcactacatccttgctgggcctctatccccaagaacccaaaaggactcaagggtggggatccaggagttcttgtatgtatggggggaggtgaaggagagaacctgcatgaccctagaggtccctgtggtcactgagagtgtgggctgccatcccctgctacagaaacggtgctcaccttctgcccaaccctccagggaaaggcacacaggggtgaggccgaaggcccttccgtctggtgccacatcacagaaggacctttatgaccccctggtggctctaccctgccactccccaatgccccagcccccatgctgcagccccagggctctgctggacacctgggctcccacttatcagcctcagtcctcacagcggaacccaggcgtccggccccccacccttcaggccagcgggcgtggagctgaggctttagagcctcccagccgggcttgttcctgtcccattgtgtatgggataggggcggggcgagggccagcactggagagccccctcccactgccccctcctctcggtcccctccctcttcctaaggaaaaggccagggctctgctggagcaggcagcagagtggacgcacagtaacatgggcaacttgaagagcgtggcccaggagcctgggccaccctgcggcctggggctggggctgggccttgggctgtgcggcaagcagggcccagccaccccggcccctgagcccagccgggccccagcatccctactcccaccagcgccagaacacaggtaagggccaggcagctaggagcaggtgggcaacaagggtggtgtcaaggcctgaagcctggggctgggaaggtctggaacttgtagctgagtcgggagggccaggtcacaaatgcaaaagggctattaatgtgcatagaacaggacagtctgggaggctcagaaaggagaccaggatcagagtcggcaggtgaaagctgggagtaagggtgccagctatagaatctggccagggtttgaatgctgctctgccgccaggagctgtttgactttgagcaagttacttaatctctctgaacctccatttatataaaacgagatatggcaatacttactccatggggaagtaagtttctagctcacagcaagccttcaacagcagcgatgattatttagctggagaagaaaggagctgacagcagtggttacaggagtgagaaagtggggtctcccagaagagggagagagttgggcaggaaactcgggcccttggggtaagcaggctgagaagacagagccaccaggcttttttcccctgctccagccccctctcctcgtggctgtcacccgaaaactggaccatgcagttcccacaagagtcctcccgggggtagaggtcccaggagggaggaaagacccggaggcctggtggggtgccaggccgggggcaggctggggctgcaggcagctatgcagggaaggctgagggccggggccctgctgctcaggcgcacccttggcctgagtccctcccttcctccctgccgctggtggctctgggaggaagtgataaggcctgcgaggcttcccttcacacatggggctgctgtcaggaggggttgtgagtgcggagggaaatcagagctgaggaatccctgcagggcttccctccactcaagcaccaggctctgtccccctcagggtagggcttatagcagctttgcggggggtggacaccccatctccagaagaggtgaggtgggcgctgcaggtgggatgcgaacttagcctcgggtcaggggctcaggagctcagcaccagcagcccctgcagcccaggaccctggtctataaacggaggcacagctcgcctctagctcctaaggcatggggaacgccagaaggcatgcggcaggtgggctgtgagatcgccagtgctgtaacaggggcctccgggtgacatctgggaaggctgaaaggaaacaaacccttcctgatgaccctatccctggctcccaacagccccccgagctccccgctaacccagcccccagaggggcccaagttccctcgtgtgaagaactgggaggtggggagcatcacctatgacaccctcagcgcccaggcgcagcaggtaaggccggcatgccctgtccccatcgtctccagggaaagrgtgggtaaggcctggcctcagatggggccggagagggaagctcaacccttctttgaattggtcccttgtttccaaaaagaggagaggactgggargaaccagaggagttgagggacatgcacgggacttgggtgaccctcagcctccagccttacccccaaccctggctcaaactctcccccatcccacccctgcacccctttyccccctcccacccctgcacccttcctccctctcccccaccccacccctgccccccctcccatcccagctctaaacccctcctccctctcccccgtcccacccctaaaccccacctccctgtccccctctaaacccctcctccctgtccccctctaaaccccacctccctctccccatcccacccctgcacccttcctccctctgcccccgtcccacgcctgtactcctcctccctctcccccgtcacacccctgcacccctcctccctctccccatcccatccctgcacccctcctccctctgcccccgtcccacccctaaacccctcctccctctgccccaccccacccttgcacccctcctccctcttcccccgtcccctgcctgcattcctcctccctctccccatctcacccctgcacccctcttccctctcccacccctgcacccctcctccctctccccgtcccaccctgcactcccgccctctccagcgtcccacccctacacccctcctccctctgccccattccacccctgcaccccctcctccctctgccccgacccacccctgcacccctcctccctctcccccgtcccacccctgcatccctcctccctctgccccgtcccacccctacacccctcctccctctcccccatcccacccctaaacccctcctccctctcccctgtcccatccctgcacccttcctccctctccccgtcccatccctgcacccttcctccctctccccgtcccatccctgcacccctcctccctctgctcccatcccacccctgcacccctcctccctctgcccctaccccacctctgcacccctcctccttctccccatcccacccctgcacccctcctccctctgcccctaccccacccctgcacccctcctccttctccccatcccacctctgcacccctcctccctctcccctctcccacccctgtacccttcctccttctccccgtcccacccctgcacttctcctccctctmacccatcccacccctgcacccttcttccctctcccccatcccaccactgcacccctcctccctctccccctgttccacccctgcacccctcctccctgcccccaactcccatcccacccctgcaccctggcctgtcctgacctttgcactccctcgacccaggatgggccctgcaccccaagacgctgcctgggctccctggtatttccacggaaactacagggccggccctcccccggccccccggcccctgagcagctgctgagtcaggcccgggacttcatcaaccagtactacagctccattaagaggtgacagcttcccggacgccacagcctcccttgtcccactgaggccccagaaaccccgtgacgaccttcccatgaccccctcccttcccagatcctaacaccacgtgggcccctcccgccctcccccagcacttgcacaaagcctggaggagggcctccctgtcccacacaacttcctgcttgtccccttcccrcccctctcctccccaggagcggctcccaggcccacgaacagcggcttcaagaggtggaagccgaggtggcagccacaggcacctaccagcttagggagagcgagctggtgttcggggctaagcaggcctggcgcaacgctccccgctgcgtgggccggatccagtgggggaagctgcaggtgcggctggccagcgactgagagacccgggcgctaccaaaaggggagcggggtggcggggcagttcctaaggcttcccgggggctgggaggtcccaaactgtgggggagatccttgccttttcccttagagactggaaaggtagggggactgccccaccctcagcacccaggggaacctcagcccagtagtgaagacctggttatcaggccctatggtagtgccttggctggaggaggggaaagaagtctagacctgctgcaggggtgaggaagtctagacctgctgcaggggtgaggaagtctagacctgctgcaggggtgaggaagtctagacctgctgcgggggtgaggaagtctagacctgctgcgggggtgaggacagctgagcggagcttccctgggcggtgctgtcagtagcaggagcagcctcctggaaaagccctggctgctgcttctcccccaagagagaaggcttctcccgccaggccagtccagtgcagcccctcacccacacccactgctaccccagttcccctgcttcggcccgcaccctccctcacaccccagcccacagactcggggctggccttrgttactggaacgcctgtgaccacagcactaagagaagcaagctgccccatgggggacttggtcccatggccttggcctccttcaccatcactggccgccaaagagtttgaaataaagccacgtgcccagtgaatcccaaaggaacctcaactaaaataaaaacaatcctatctgacacttgcctgaccctctaagtcattcaaagctttagctcaacttcgatccatctgagctgccatagtggaccccactcagagctgcgtccctcccttgaccccaggttggtccctgccactcccctgcccctgtcactgacacatgtttcctcctccctcaggcaggagtgggacctcccagcctcctcctggggcctccactcagaatgtcaggatgagcagggtcctaggaggcctctggtgcagccttcccttcccaccatccatgtgctcaaagagaatcacccgtcctttcttgaatgccatggatcatgggggatttgctgcccacactcctaggcggcctcttagacatccgttggtgcctaacccaagcatcagtttggcagaggccgagtccctcctctgtactrgataccaagtcagcttccrtagggatggggagacacctggcccagggaggagatgagaagcagcccggatggtgctacatatgtcagagagcagggcaggaagggatcagtgtggctgccaatggtcaggagggcgccatggagtgaaccatggcccctgcctcctcaccagcagctcctctggagctgatactcaagaccccccgtctctctcctcaccctcctctcccgctgcctcggctggctcaggtgttcgatgcccgggactgcaggtctgcacaggaaatgttcacctacatctgcaaccacatcaagtatgccaccaaccggggcaaccttcggtgagtgccccccaccatgccaggccccagccttcttccccaaggcagggaaggcggggctctgaccagctctttccccatgcgtgccagctcggccatcacagtgttcccgcagcgctgccctggccgaggagacttccgaatctggaacagccagctggtgcgctacgcgggctaccggcagcaggayggctctgtgcggggggacccagccaacgtggagatcaccgaggtgggcaccgagggccacccatgagggtgtccccaaggtggagaatgaggaaaccagtgggagaaggctcgggggatccaggcaggaagaggggagcctcggtgagataaaggatgaaaaacaccaaaggaggggtgcctgggtggtcacggagacccagccaatgagggaccctggagatgaaggcaggagacagtggatggaggggtccctgaggagggcatgaggctcagccccagraccccctctggcccactccccacagctctgcattcagcacggctggaccccaggaaayggtcgcttcgacgtgctgcccctgctgctgcaggccccagatgakcccccagaactcttccttctgccccccgagctggtccttgaggtgcccctggagcaccccacgtgagcaccaaagggattgactgggtgggatggagggggccatccctgagcctctcaagaagggcctgcaagggggtgctgatcccacaccccaacacccccaggctggagtggtttgcagccctgggcctgcgctggtacgccctcccggcagtgtccaacatgctgctggaaattgggggcctggagttccccgcagcccccttcagtggctggtacatgagcactgagatcggcacgaggaacctgtgtgaccctcaccgctacaacatcctggaggtgaggtgcgggatggggctcgggcaccgaatgcacctgtccaaggcaggagtctggctctcactccatccccaaaatgccagccacggggacaatcagagcaggtccagggttgcctcctaaatgggaactgaggacaagctctagaaccactgaagcaaaggggtagggggtggcaggggtgtgtgtgggggtgtgagtgggtgagtgtgagagtgtgggtttctggggtgtgcagtgggtgagagtgtgggcttgtggggtgtgtagtgggtgtgagactgtgggtttgtaggggtgggtgagtgtgggtgtgtgggggtaggtgggtgtgggtttgtgggtgtgtataggcagtgactgtgagactgtgggtttgtgggggtaggtgactgtgggtttgtggggtgtgtaggggtgagtgtgtgtgggtttgtaggggtaggcgagtgtgggtttgtggggtgtgtaggggtgagtgtgtgtgagtttgtaggggtaggcgagtgtgggtttgtggggtgtgtaggggtgagtgtgtgtgagtttgtaggggtaggtgagtgtgggtttgtggggtgtgtagggggtgtgtgtgggcttgtaggggtaggcgagtgtgggtttgtggggtgtgtaggggcgagtgtgagagtgtaggtatgtgggtgtgagtgtggatgtgtgtaggcggtgagtgtgaaattgtgggtttgtgggggtgggtgggtgtgagtgtgtgggtttgtgggtgggtgtgggtgtgagtgggtgggtgaggggggcatggggatgggtgtgaacatgtagttgttctttcaggcataggacccatagctctagagctttcatcagattctcaaaggggaccttgactcggmaaaggttaagacccattttagagatgagaaattaaagcctggagctgaggagcgactggcccaaagtccctctctgctctgaggtgccttcgcaggcaaaaacctgaaccagccccctaggcagccaggcctcccaatggacaccactcacctcactccttccagccatgtacgggaaacagagatagtctccccaccccacccccgtgatcacctctgtccctaccgatgccacacacccttctgccccaggatgtggctgtctgcatggacctggatacccggaccacctcgtccctgtggaaagacaaggcagcagtggaaatcaacgtggccgtgctgcacagttaccaggtgcagaggcccagactggccaggaaggcaaagggtttgcatacrggggcagcaggggcgggggatggaggagaggcagccatttagaaactagggcaggatttggacaggcagaagaagttccgtagtcccagtgccatggcgcacactggcctgcggttcggggacagggcaggtactattccaggcgctgtcatctggtggcttactgtgtgccagggaccttgctgtttactgcatgcccagtcatgctgattctcagggcatattgggtattgcagtttgtgggacccgctggatcctggaaacaaataccaggatcaagggcacaccaggagtcgtagtttgaggaagccggggcctgctgagaatttctgtgggctatttggtttggggaccaggcatgcagatgctggagattagagctgcttgttgcatgttgaacctgcagcatgaccatgcatgatgtggtttggggtgagggtgacattgtggtttgaggggacacagggtgtgttagatatggggtaatcgagggcacatgtggtttggggtgaccggagtggtggaggaagaatgggcgaggtctgtgggtctggtttgagcctctccccctctctctcccttccagctagccaaagtcaccatcgtggaccaccacgccgccacggcctctttcatgaagcacctggagaatgagcagaaggccagggggggctgccctgcagactgggcctggatcgtgccccccatctcgggcagcctcactcctgttttccatcaggagatggtcaactatttcctgtccccggccttccgctaccaggtgcccaccctaactggctctgccagcctgggcccagctctaattctaagcagcccctggggacctctaacctttccttttctttacctcccctcccaaccccatcatctctctgcagccagacccctggaaggggagtgccgccaagggcaccggcatcaccaggaagaagacctttaaagaagtggccaagtgggtcccctgggagccccgctctcccacacacaccctgggggccccactctcccccacacaccctgggggaccctgccccagcagtgttctggrcctaccactcagtatcccaaaaccctgttgtgagggggttggacccttgcctggggaggccctgcctctgtgcacccrggacaccctcacaccttcctctcccgcagcgccgtgaagatctccgcctckctcatgggcacggtgatggcgaagcgagtgaaggcgacaatcctgtatggctccgagaccggccgggcccagagctacgcacagcagctggggagactcttccggaaggcttttgatccccgggtagggctgagcccaggggagcagggagctagaaagagggggctctatcagcatcttcaggggtgccctggaggacaggaagtgttacaagtcaggactcatgaggmacccggaaccacaggtgttcagagatcaagttggggcctgaatcttgcactgccagggaggccagagtgaggagggcagggcctccgggkgccacagcacccaggacatctgtcttcccacccacaggtcctgtgtatggatgagtatgacgtggtgtccctcgaacacgagacgctggtgctggtggtaaccagcacatttgggaatggggatcccccggagaatggagaggtgagaacttccaggaaaggggctgctgggaatgaggagagactcagaattggagtgactgggcaggaacctctgcccaacacacacacacacacacacacacacacacacacacacacacacacacacacacacacacacacacacacatgccaggatggaaagggagatgctaagagacccctggagcctgaaaccccacacaasstacgctcccagcccacccatgtggctgcctccctgcaagcacatttgcttaactgcgcgtccccaagtcatttccattatcagtgcaagtttttaatacaaggaaggcacatcctggctgaccaagaggttagactgtgctcgggcactgacaagaaaaacagggatacgtcactgagggcggcttctaggatgcgggtaatgtttcttaatgggatactggttacacaggtgtgttcagtttgtaaaaatccacagagctgtacatttacaacatgtrcaacactattccagcattttattttttgttttatttattttgakaacctatttaygttgcccaggctggccttgaactcctagcctcaagagatcctcctgccgcaggctcctttttcaaaagaagaaattgagcgctgtttagatgccaacatagattaaataacttcactttttaaaaagaaacacaaagctagagtaccatcattgaattccttctcttgcaagcttaggtatctctgaggtgccccaggctaggctcatttctgagtcttacctgctccagcttctaggtgttaaaggccttattagcactaagtacttcctcagtactcttttttcttttttcctttgagacagggtctcactttgtggcccaggctggagtgcagtagtacaatcacggctcactgcagcctcaacctcctagactcaagcaatcctcccacttcaacctcccaagtagttgggactacaggcgcatgccatgatgcctagctaatttttgtattttttatagagatggggtttcgccatgttgcccaggctggtctctaactcctgggttcaagcaatccacctgcctcggcctcccaaagtgctgcgattatagacgtgagccactgcacctggccckcagtatcttaagcaagttggaatctcgtgaaaccctttttgctgccttagtgtccgtttcagccctcattctkacctaccttttcaagaaaaatagcaccagcaattgacttttttttagcataaaggtgtatagacacccatataacctacagccttcacaaggcatagcacattttcaccaccctggaaagttccctcatcagttcctcacgtgaatcccttcccagtctgtctccctgccagaagtgtctgtcaccacagaatagtttcgcctgctctagaacggcacctagatggaagcacgcagtgttgcggcgtctcctgctgaggctgtttttgaggcgcactcgtgttgctgcgtgactcagtatttcactcattctgctgctgagtgccgttcattgtgtgaatatccccagtttgtttacccattctcttgttggtgacacttgggctgtttccaggtcggggctattatgaataaacctgttatgaacattcttgtacccggcttttgtgggcttatgtttttatttctcttgggtaaatacctaggagtagaattggtaggtcatagggtagatgcatgtttaatctttcacttttttaaaaaataaaactgccaggccaggcgcggtggctcacgcctgtgatcccagcactttgggaggcccaggtgggtggatcacttgaggtcagaagctcaagaccagcctggccaacatggcaaaaccctgtctctactaaaaatacaaaaattagctgggcatggtggcgcacgcctatagtcctagctactcaggaggctaggcgggagaattgcttgaacctgggaggtggaggttgcagtgagccgagatcacgccactgcactccagcctgggtgacagagcaagaattctacttaaaataaaatacaaataaataaaataaaactgtcaaacagcaaagcaaattaaactgccctttaacatctgtgcagttcaatgtatgttaattttatcccaaatttttaacaaatctaggaatacagctcacagaaaatggggtatattcactaaaaataaggaatatttatagcaaatttgtttgtaataccccacactggaaacaattcaaatgaccatcgacaaatactgataaattgtggtatattcaagtgccatatcgcactaagtgtgaacgaaacacaaccacacacaacagtgcaggtgaatctsaaaaaatgtgaagagaagaaaaagccagaccaaagaatacatactgtactacagggttcactttatataaagttcagaaacaggcagaactaatccacggagttagaaattaggagaggagttagtcactgggatgggggtggcagtgacaggaagaaggcacgaagttggcttctaggatgcgggtaatgtttgtttgtttgtttgtttgtttgtttttgtttttgagctggagtctcactctgttgcccaggctggagtgcaatggcgtgatctcggctcactgcaacctccgcctccccggttcaagcgattctcctgcctcagcctcccgagtagctgggattacaggtgcccgccaccatggccagctaatttttgtgtttttagtagagacgcggtttcaccatgttggccaggctggtcttgaatccctgacctcagcctcccaaagtgctgggattacaggcgtgagccaccacgcccagccacgggtaatgtttctcgatgggatgctggttgcacaggtgtgttcagtttgtgaaaacttacagagttgtacatttacaacatgtgtgcacctctggacttgtgttgcacgttgacaaaacattcaaaaatgaaattcaaatcgttcttgctaactctggcgcacttgggaaccagcacccagaggcatctgcagttgagcaccagatgcagttccttccagcttccttccccctgggaggtccgcttgatgccacttcttcatggcagcacaaacaaggccatggtcttctgaggagggcaacctgcacaatgtctgctagtgaccaggacactgctgaaggaactgagagtttgtccacccatgaaatccactaaaacaggaaagattttgctctagccgttgttagccaggagtgaggaaagagctgtgccctcccctgcagctgcgaggacgatctgcctgccccaacaagtggggattcagcaactccacttctaaggattacccagctgaagcatttaaaagtgggagcaaggcacacgtacaagggcgtttgagagagcacctgttcccagaccaccgagctgcccttcagtctcagtgaagtacaatgtagccactaaaaagactgaggtcatgttttggaaagtccaggccggaggatcgcttgagcccaggagttcaaggccagactgaacaacacagcgagactccatctcttcagaaaatttaaaaattaaccaagagtggtggcacgcacctatagatctagctactaggaaggcagaaaaatcccttaagcccaggagtytgaggttacagtgaatgatgatggagccactgcaccccaacctgggcgacagagcaagacccatatctaaaaacaatactactacttacgtcaatattgttgtattgacctggagggatgtctgcaataaattattgattaaaaccaaggaagtacagtatggtaccacttttacttaaaaaaaaactataaatatgcacrtgcacgtaagttcaaggaaaaagggctggaaggttaacacctgtsaatggcgcatatgcccggagggaagatggggtggtctttgtcttatcactttacacatttctgtaatgtcatttttcaaaaacatcagatcgcttttgaaattttcaaaacaaataaaaattaagtkacaaatcaataataatgaggatcagctggtacagttttaaacttctatgtagtttgaaatgaaacaaaactaaccctgatgcaaacactcccctcgccagagctttgcagctgccctgatggagatgtccggcccctacaacagctcccctcggccggaacagcacaagtgagttgggtgagagtttgggggagctgggggagctgatgcatttggagacacaaacagaaagggggtctgaaaagctctccctctgtgcctcaagtcgttttcccacyaaaagccagggctccaggatgccctccattccaggctgcaatggcagtccagacctgcctgcttctgagagccgggacagtcctgaggtcttcagagatgggggtgtggtgtgtcagggccccaggctckgaaccccagggatgctggccctcagcccctcccaagggcagggcctttcctgtcccagaggcagagaccctgaagccgtccctggggctgggkctgggcctagccwgtatccccagggccctgtgacaaccttgtctttgtcctctcttgccaggagttataagatccgcttcaacagcatctcctgctcagacccactggtgtcctcttggcggcggaagaggaaggagtccagtaacacagacagtgcaggggccctgggcaccctcaggtcagggcctcaccaagaggggtgcaacgggtgggcaagctgcctgggcaaacgtggcctgcaaagggagctccactgacgacccctgcaccccaggttctgtgtgttcgggctcggctcccgggcatacccccacttctgcgcctttgctcgtgcsgtggacacacggctggaggaactgggcggggagcggctgctgcagctgggccagggcgacgagctgtgcggccaggaggaggccttccgaggctgggcccaggctgccttccaggtgagcccagcccagcccctgctctgactcctgccmcctgggatgcctcctcctgcctcactctgccctgattctgtttggttctttggtcccttcctgttccttccaaaatccrccctcatctctccatggcatagccagctcttctgggtcaggggcagaggatgacatggccctgccgaccacaggggtgcctagcccaggcagaagtgcagccgaaagagagcaggcagggccctggcaggagggagcttcagccaggcacaggctgggcctcacaagtgggcgcacaaagggagggggtgcagggcagggcaggggaccccacccaggatgggcaggatggagggagaaggaagggacagagagaaggtcagacagaggcaagggctgaagctgaggccagcacagaagccacaggaagccagaggccagacagcctggggcggtgcctgcaccgcagaactggtccckggccrggcaagcaagcacagggagaggtggatccctgggggctgtggctttttaagcctgggcttcctcaggggcagtgctgcctgtctggggatcatgtctgcagttgacaagggctcggtctccccagtgccacactgttcagggcagtgctgctgtcccggggcccaggctggagctcagcagatttgccttgattggaggaggagggcatcctaggaggagagggagtgggggctacctcagggacggggaggtcaggctgcagaaacacataggccctgattgggaagaagggaacggaaaataagacttaaagaatttaaacaaaaagagccattgcagcgggatgagaccacatcatcaggttttgggaataggactttagaggcgtaggatccattacagcatcaccgaaccagaagcaggaaggctgagctaagcagagcagcagcagtggagataggaaggaagggagggaggggccgaggaaggaaggaagagatataagacttcacacgcaccacaaaagaaagattaacgggacttggtgatatgaggctcagccaatcacgggtgagccctgcatttcaagcctgggactggcccagcagttttccagctgtgtgcctgaccaggagtagacgggatccacaccctcccagggatctgccccgtggggtcccctctgccgcccgaattgtgcgtcccttcccaggagcacttactatctgcacgcactttgtggaaagctaagggctttacataaagyatctcatttaatcttcaccagaacacaatgaggtgtaaagatggggaaactgaggcatgtcactgtaagtacgggattcggaatttgaatgcaggtctgaacacacagacgccttcacagagctaccgtgtgccaagcactatgcttctcggatcacgggattaacacgcaccagataaggaacgatgcaccaatcaggacgtgcagagaaagagccagccgggtccctgggcccagcggccaatccatgaaatgggctggcggaaaaggtgctgtccttggcgccggcctcagccactggggctgccaaccccccaggagcaagacgcagtgaagccgcccaggcgcctcactaggkcgacccctggtggcgggaggtcctcagccctcaccggcctgtcccgcaggccgcctgtgagaccttctgtgtgggagaggatgccaaggccgccgcccgagacatcttcagccccaaacggagctggaagcgccagaggtaccggctgagcgcccaggccgagggcctgcagttgctgccaggtgggccctgccctcaccctaacccgrctggttctctgakgcccccacaccccgggactaaagcactctggggccaggccctgctccctagctcaggctgcctcatttgcccctccccgcccccaggtctgatccacgtgcacaggcggaagatgttccaggctacaatccgctcagtggaaaacctgcaaagcagcaagtccacgtgaggacgacggctttaccgmccccmmacccctgtcctgaacaccctgaccctggaccctcctcctcccacattctcccgcccccacccctctctgactccccataagtgcccctctccccacccccaggagggccaccatcctggtgcgcctggacaccggaggccaggaggggctgcagtaccagccgggggaccacataggtgtctgcccgcccaaccggcccggccttgtggaggcgctgctgagccgcgtggaggacccgccggcgcccactgagcccgtggcagtagagcagctggagaagggcagccctggtgaggggcagcctgggaagcaacagggcacaccagccccatgcccagccccacccccggccccaggcctccaggagctcaggacccgacccagggggtggccacctcctccacagctcagcaggcaggctcagagctggctgtgctgcccactgccgggctggccttgttgctggaccatccccacaccctcaaatgcacccccaccaaaaggctgtcccctccctctgggctcctctccraggctcccctagcaatctagcttgctctggagctggcactggggctatttgctgccacatcaatgcctgggctttatttaaaataagggggtggagtcagaggcagaggagcccagaccaacccagtccggccaggggcccccgaacaatacactgaggctacctagacaggccgaccccgctgctcaagggcaggctctcyaacagtcaccaaaacacaaacatcagcccaggtactgcagtcctgctgggccctgtcctcagagctccctgtgcactatccccaggtggccctccccccggctgggtgcgggacccccggctgcccccgtgcacgctgcgccaggctctcaccttcttcctggacatcacctccccacccagccctcagctcttgcggctgctcagcaccttggcagaagagcccakggaacagcaggagctggaggccctcagccaggttgggggccaccccaatgaggcacaggggctagagagaygggatgagctggggggaccccagtggcaggaaacccccatgcaaagtcccccctggactttcttctcctggcygacatgcactggtgctttaagacccagctcctcagggaggaattcatggctggattctccaggtcttagagaaaactctattggcctgaactgagcagggagaaaccctaaagaggctcagtgggggaggggtcaagaagggaggttactaggaagggctatggggcctccaacccactgcatcctgccccgccaggatccccgacgctacgaggagtggaagtggttccgctgccccacgctgctggaggtgctggagcagttcccgtcggtggcgctgcctgccccactgctcctcacccagctgcctctgctccagccccggtactactcagtcagctyggcacccagcacccacccaggagagatccacctcactgtagctgtgctggcatacaggactcagggtgaggcaacaagcaggagcaggcctggccacagcagggttgggaccrgcccctctctggcccctcaccggcctctccttcccacccccagatgggctgggccccctgcactatggagtctgctccacgtggctaagccagctcaagcccggagaccctgtgccctgcttcatccgggggtaagtgagatggargacttggtggggagctgcccagggtcagggtggcagctttggtgaggagtgtcactggtgaggggtgtcactggaaacaggaaggagctctgtaacatgtcaagggtgtggtgtcattaggtcacttcagaactctggctaagctttggctctctcattcatttagactcagagttctgccctgaaactatagctcccagagccagagctggkatcaaaccggctggccctgtggctttctgaaagcttctgtgttcctctctatgtccctgggctgtctgatgttgggcagcatggcacctgggaactacagtcactaaatcctcactcaatccagggagaactactagttagggttaagaccaccctttggccttggtgtcaccaaggactcaaagaaggtgaaggttttggtttttttttcccccagagatggagtcttgctctgtcgcccaggctggagtgcagtggtacgatctcggcttactgcaacctccgcctcccgggttcaagagattctcctatggcgtgaacctgggaggtggagcttgcagtgagccaagattgtsccactgcactccagcctgggcgacagagccagactctgtctcaaaaaaaaaaaaaaaatattctcctgtctcagcctcctgagtagctgggattacaggcacccaccaccacgcccagctaatttttgtatttttagtagagacggtgtttcactatgttggccaggctggtctcgagctcctgacctcacratcctcccacctccgcctcccaaagtcttgggattacaggtgtgagccaccgcgcccggaccgagggtgaaggattttaagagacccttccttcatgctgtgtccagaagtcttgcccgctctcgcagccaggaaccaaaagtcctggtaggactgagaacagttcctaggctgccatcagctgggcctggtgattcaaatccacccaggtggctaaactacaaataaaccgtacccatctactgaacataaactaaataccactattaaggatacttaaaataaacacacttagtgaacccattatgaactgaaagtgtctttcacccttcccacgttttctaaatcccctgagtcatctaagtattcttcaatccaaaatgaactatatttcctttggtgcaatctccagaaaccacagatccaaggagtttcagcaagtagagttgttttttgttttttgttttttttttaatttttttttgagatgggaagaacttgggtcctccttgctccacccaccctgcatggtgagaatggtggagcaggaaaggcaaaggggacctgatggagtgtcyctcctgccagggctccctccttccggctgccacccgatcccagcttgccctgcatyctggtgggtccaggcactggcattgcccccttccggggattctggcaggagcggctgcatgacattgagagcaaaggtgaggctgkkgactaaaggactgcctgaagggagtcacacaatctagggacagaggggtggggctggaaggcaggaaataggaaagagagggcaggaaacaaagtccacaaagctgaaaagacgctcatgagaccaaggggagggcaggtaccaaaggcaagggctgggccctgagcttctggcttcctggtgcctggtacatagtaggtgttgactggattgaggasaaaggaaaatagaattttcraagggattagggctaagactcaaagaagaactgcccaaggtggattcttgactgtgccagagctgaccgaggtctgtccaagacctaaggatgctacaaggtgttcatattgagcatggggtgcccagggtggtctgtcaatcaaaagaagagggctgtgactgggaggagagttataagtatgggagaatatgaagtgggagcggggaaggggactgcgatgtcacacaatgcaaagggcatggaattctgagtccgaagccgcgcattctagcgcagctccaccaggggccaccacctcacccgcgcttcccttccctctgtaaatcagggctgtgcagggtctctgtgaaagcattctacactctcttagagatgaaacagccaaagtaatrgtggtttcagcccaaaacgctgggctgccaggctgggcgacggtggcctgtggggaggccccactagcactgtgccccggagaagagccttcccaagcgcggggttgcttgcagggctgcagcccactcccatgactttggtgttcggctgccgatgctcccaacttgaccatctctaccgcgacgargtgcagaacgcccagcagcgcggggtgtttggccgagtcctcaccgccttctcccgggaacctgacaaccccaaggtgtgagaccctgagggcgcaatggtaacctgaagatagggagagaggggaggactcgcgctctccagcggggcacaccaaccacggccctcccgtggcctcccacgaccactcagccacccctgcacactctggcccacccttgtgccccggcccctctaggcccgcctcctcccgcccctgccccgcccctttggctctgcccctgttgacamcgccccagggcacgcaggccccaccaggcccgctccggagamtttcacgtccagggccagccagcagccccgggctgcgcccccgcgcccacccccaccagggcccgccctaaccccgccgccccgcagacctacgtgcaggacatcctgaggacggagctggctgcggaggtgcaccgcgtgctgtgcctcgagcggggccacatgtttgtctgcggcgatgtyaccatggcaaccaacgtcctgcagaccgtgcagcgcatcctggcgacggagggcgacatggagctggacgaggccggcgacgtcatcggcgtgctgcgggtgcggaggggcgggccgggcctgagcgtgcggggttcctgctaaggtctccgagtcgggttctgatccactgtgctcttttccgacaggatcagcaacgctaccacgaagacattttcgggctcacgctgcgcacccaggaggtgacaagccgcatacgcacccagagcttttccttgcaggagcgtcagttgcggggcgcagtgccctgggcgttcgaccctcccggctcagacaccaacagcccctgagagccrcctggctttcccttccagttccgggagagcggctgcccgactcaggtccgcccgaccaggatcagccccgctcctcccctcttgaggtggtgccttctcacatctgtccagaggctgcaaggattcagcattattcctccaggaaggagcaaaacgcctcttttccctctctaggcctgttgcctcgggcctgggtccgccttaatctggaaggcccctcccagcagcggtaccccagggcctactgccacccgcttcctgtttcttagtcgaatgttagattcctcttgcctctctcaggagtatcttacctgtaaagtctaatctctaaatcaagtatttattattgaagatttaccataagggactgtgccagatgttaggagaactactaaagtgcctaccccagctcatgtggattacagttttttttttttgtttttttttttttgaaacggagtctccctctgccgcccgggctggagtgcagtggcgtgatctcagctcactgcaacctccaccccacaagttcaagtgattctcctgcctcagcctcccaagtagttgggattacaggtgcctgccaccgcgcccggctaggttttgtatttttagtaaagacggggtttcaccatcttggccaggctggtcttgaactcctgacctcgtgatccaaccgcctcagcctcccaaagtgctgggattacaggtgtgagctactgcacccggcgtggattacaattataaaatgacaagatttctgttttaacctgtgcagttgtgggtatgtggtggggaaaggggtcattcttttgacagagtcctacacgccacttgaccctgcactctgaaaacatggtttccagccagtctgggctgctcccccgtgcagttctcaggctcgtgatcgagaaggcaggtgcagcactcagctgccaggagtggggcctgccagaaacaagagtcacagagatgtgcaacagccatgagcaagctttactgcttatttcatacaggatggggagccacacccacttcctgggacatcacacccgtactgaagtccaaaaacatcatccctcccgtctttccactgacaagtccccatcccctacaagccccaaggaacctgaaagtgctgctggcagccgccagcatgacgaatccacagccttaaagcccacctgcctcactgtcgcccttccatttagctcggcctcatccttgacctctgtcccccaccttgaggaaactcgaggacttcttcccaggcagctgctccaggacacattccagttggggatgtctccccttattccctctgggtgcagaccatctctaagacttgtttccagatgccatcagcatctcctctccttgcctaccttttctctgttctcggggcgagttcctcactgactcccaggtcctgcccaactaaagcacctgggcctgtcatctatggggcctctaacaatgactccttgtgtttttctactccaccctccaatctcctgtggctgccgaagccagggtacctgtgggaggagacggctcttggcaagcagtccaggggtctagattccagagatgaccacctcccatcaccccaaattcccaccactgctcccatcgcttcaagtcggactccaaaccaactacctatgccgtcctttctccctcccctcacaggaggcaatactgaccctgaggagtcgtctcagtcmgtgcaagaggcccggtcaggctccttctgggtgtctgtggtcacctgaaaccctccggggaacagattccgggccttctgggttccccactgttgtctggggctagaggcaggactggagcctggtgaaaaaggccatcagctgggcagttccatgatgcccagtgtccaccaggctctgtcccctgcaggccccaccctcctcaccgtcacttgaccaggatggcttctcctcatcaggygagggtggctgtgaggggctggagcagggcctggacagsatggaggctgcagcctcaccccacggctcctgctgctgctgctgctggtgaagctgcatggaaaggaggaggaatgagggctgcaccccaaggagggcagggccaagcacctgggctagaggcagagggcttttcagcctcctcctgccactctgctagacccttccgtagactccaccccacctcagtctccatgttgttcacctgccttctctccacatttctcctttgggcacccctctactcacctggtgcaggtagatgacatggagactcatctcggcagaagcaagttctgggagctgggccagcttctggcccccagtgcctcctggggacacagagctggaacataacatgaagcaggtcaaaagtcatgccctcctcccgccacaccccagaggactccccttctgaatcccccctcagcgccccagctccccactcctacaggatcagcccacccccctccacatgcccctgcatctcagcctccactcctcacctggggtcctgggcaattcgggaaatggaggcaaggaggctggctgtggccrcagctggacagggggctgtcgggctcagatctctcggaggcaggagagggtgcacgaagaggttggccaggaaggcctcaggctgggtgcaagaggagagggaaagccaaagagggagtcagaagagaggacagaaacggagtagggaggaagcagaggcctaaagaaggcaggagagcaggctgggggcgggggctggtgaggcaggttactacctaaggtgagcctagaggggaagggtttggagaggagttgtgggggtgaaggcagaaggggaggccaggcttgggactcaccaggggcgaggtgcagttgctgagcacccccggggtggaggggcygcgagccgaggtggcaccccaggcagctgcatcttgttgtactcggccccagaggtgcccaagaaacttagagctgtgccctggggggcgccagagtggatgcgccagggagaaccgcatcaaagaaagctcagtcttgccgtcctccgcacgctgagacagcgaggcctcagtctgtcccgccgagagccactgtgagcaaggacagtctttcaggtgctaagaacactgagccttatgggaacaggtgggacaggaaacactgccccatcttccacgtgaaggaaacagaccacaatggggacttgttcaccatcacccaaaaatacagcagcagtgcagaacctgggcctgtcatctattcgtcacccctggactgattgccagctcggggatagggctgagcctcagtgctttgcccagggtgatcctgacagccttggtccaggcaccagtccttactcagccccacccacyggccaagcccattcctcacccccaggtggtctttgctcccatttactgacgttactatgtgccagcaactccatcataggctatacagacataatctgtgtgttcacaagcctggccttggctgtgctctggagagcacattgccattgttgccatctgacagacgagggcacgagagcacaggaagggaagtgacccgctcaacggcacaggtagcaagcaatggagccagggctggaactcaggtctgctcccgagaggcaagcgaactcccacccagcccaaacccccagggccagggaacggctctgacctgagggtgtccgtggcgcttcacatccataagggcaaaggaacagatgtccccaaccccagccacatccacagtgaagtgatgaaaaaagtcgataatctccagggcacgagggcggaaccagaaaagcagaaacagcggggtgaggagcggggacaggagctcctccaggagggagacctggggaagcagcggtgaggctgagcaggggtcgctgaggggcccacgcgcgttatcaggaccaagcagtccccagcgaccctcgccagggcaagaagcctccccacccagtcactccctagactcctggtatagtccgtttgtctcatgccctctcccagacagaccctccgcgcagacagaccctccgcgcagacagaccccacaacttcctcctcagcccgccgtcgcgcccaccctcaccgctcggtactgcagcagctgcgccatctgccggtaggcgcggtccctgccgccggggccgggctcctccgggaggtagtgcatgtgggccagggctgtctgcagcaggagctgcggcgcacgaccctggcactgctcttccggaatgaaagacctgaaaggcgggatccgtggggggaaggggcctgcgattaggaggacgcgcggtgggatgtagggctagagggccccagtggtgggagaggtaaggattcggggggaacctcacatggccccagatcagagaaaccaacacacaccaccaccccgggcatctgccgtcgcacctggcgacggtggcggtgaccccgagcgcggtcatggcggtgagcacgtgctccacggctagcacgtcctcgtcgtagacggtgagcacaagcagcgcggcgaagagtgcrcccgcgaagaaaacgagctggcgggccagcagcgtgcgcaggggcgcggggggcgcagcggtgcgcaggaaggcggcggcggggcggtaggcgcgggccaggcgcgcgcgcagctcgtgcggcagctcgttgaagtggcgcagctgcaagcgcgccaggcgggaccagccgcgcgcccccagcgcgccaggctcgcgccgcagcagctccacgtggctatagaagacgtgcagaacctgccaggccagcaccagcgggctcagcgccaggttcagggcggccagcagcagcactgtgcgcccccagcgcgctgctagggcgccccgctggtcgctgcgcttgtaggcgtgcggcagctcccagcccccgcggaagagcgagaagggaccgcggaagagcagcaggtcgacattgagcgccaggccgcggctgaggaaagccgcactgcctccccagggcagcgggcagcgggccggcagcaggcctttgttggccagcgccacctggtagttggtgtagcgcaggatgcggtggtggatgtccagctccgtcaggggccgcggctgcacgcacaggcccccgctccgctgcagtgccaagaggcgggactgcacctctgcccagggaaccgagctcagctcctcctgaaaggggcactgatgagagccagcgaccccccattcctctccacagtgatgctcaagctccacacccctaagtgtgcggcctgaaaacccgcaaactgagtttgcgatcacaaactcgccatgaccaagctacatcgtccccctctcccacctttctctttctgccctcccttaaccctgtcactaacaagggcgcgccctacttccttcatcctcttctaaactgccctgttcatcatccctgccattcatgtggccagtagtcatgcacttcctggggacgcctccaggtgctggacctggcttctcagctccttaagggcctgaggccccctcagttgtacacacaaaacagactggctggccaggggcggtggctcacacctgtaatcccagcactttgggaggctgaggcaggcagatcgtctgagcttaggagctcgagaccagcctgggcaacatggtgagacactgtctctactaaaaatacaaaaaatagcagggcgtggtggtgtgcacctgtggttgcagctactggggagcagaggctgcagtgagccaatatcacagcactgcactccagcctgggtgaaagacccagaccctgtctcaaaagaaacaaaacaaacaaaaaaacaaaaaaccagaatgtctggcagttcgtgggagaatctctccttcccatttccagtgcacccaccaactctggaacagaatcctccccaccttctgcctgggcatgctttacactcccagccccacccgactccaggccatcttcggctctgtcaccagaagccttcccaggacctgggctatgtccacatctggcagtggggcactgtcagatctcatttgaaggctgcaaacctcacttcagcccagtttcactcagctttcccagtccaggttagtcaagtcccccaggctggcctctccagtacatcccagtgtcttcccttcccttcccctggaaggaacaggggaggaggggaaagaagggaggaggagaacgagacgggtgagcagtctcccgccagagccaatccgaggtccagcttccgctctcaccacctctgcttccccggcctcctccctctcctctgctcaggggccttctaagacctctccccttgctgcacataaaggctgtgcagagggctccggacctcccaggggagcaagggaagcaagctgcagaaggctactttcaagctgtgcctcaaagaaagaacttagatacagaggagggaggagc

SEQ ID NO: 94234 - DNA, 29545 bp, Homo sapiens
  misc_feature (1)...(29545): n = A,T,C or G
ctctcaaaccccaaggatgaacgaaaaggcataagcggccctgatcctagaaacgtacaaccaaaagcagagctacaaatatggactcagacttgagagttttacttagaagtaacttactgtacttgagccagtcataagttttctgtgcactgaatactgtatatgagaaaattctgtgagtcataaggtttgggtagggatagttaaaaattagtaatatacagtattattccaatcaaatttttttctcgtaagttatatttgtaagaaaactataattaaaatatttttatacctgcttattacatatccagggacccagcaggaacatctatgtgtttgatggtttggcatccactttattgtgcttactgatttttgtgatgaacaagcaacacacatcacatcttcacaacctttaaggtaatgcaacaaggacataacattctccaaagaaataactggaaattgcattaaatactgctttaatgaggaataattgctataataaaacaaataacattatacattattttttcaatgagcttcagtttgaggaactgaatagtagaaacagatcttaatatatgagtcatggtaaaactggtaaatctttgaaatctaggaggtgcattagcaaaaccacagccacaccaacctttgccaaaatcctggagaaaagcattttattaatttaggggaacaagatggaacactggcaaagatacaacttgttgaggtctaaagctacctgagaagctggcccaaggaatgaggagaaccaatggtacgtactggtggcagataataaggtttgcactgggctgaccagctgtgttttattaaatggccttcaataaaaaaagtgaaatgcttcattgtgttttctcagaaactagtcaaaagattacagagtcctacacaatttggagacacaaagtggatactgagcaactaaaggtctttccaggtgtggaattttacaaagtccttggagtaaatggcagtgtggctctggcagcagataggaatgatactctggagaggaggtagagacactctgcagtcggccaatggatacatgaggggcccagctagaagtaggatctttaattctatggtttatcttccatggctcatgcctctgccttcataaatggtaatttcaataactcgcagtccttactcaatggagtctgtcaggagaaggccttgtggaacatagatcttctcattctgctcttgaatgcatttggagactttcttcagaagcttctggtaatgagtttccaagcataggaagatggtatatgctgttaaacaagccaaacaaccttcgagatatgattggccaccaagcttctctgcttctgcataaaggttatttagagtttgaactatttcttcaaactgctgcctatcaatctggttctccagctccatggagaacatggtctggaactggcagcctgtgccactgctgtagtctcgctgaatgaacacctttctggactctggtgcctgccgcagcctcatggcaaggacaggacaggccgcactctaatttttgtgtttttagtagagacttagtttcaccatgttggccaggctggtctcaatctcctgacctcaggtgatccgttcacctcagcctcccaaagtgctgggattacaggcgtgagccacttcgccctgccctcctatgagtctttaatgccaaggatgctttgtcaagataaaggctcacgtccatttcagtgtcaactgtcagggactcagctgcagacacttttgactcatctgctttctgtttatttgtttttgattttttgttttttgcaagcctttatgctgccttcctgtctttttttttttttgagaccaagtctcgctctgtccccaggctggagtgcagtggcacgatctcggctcactgcaacctccacctcctgggttcaagcgattctcttgcctcagcctcccaagtagctggggctacaggcatgagccaccgtgcccagcttgccttcctgtctttctcctcttcctgagtctcttccccatccctacagcatggccttcacgtatgccaagcttgcaagcttgctgtttgttgcaaacaaacctggactgacaatctctcttctgtcttgtggacagccagactgactgtcctcttctacctgggtgcctgtgtacatgtcctctaacccctaaccctaaccctttgcagcttctgtttcttttcttttctttttctttttttttttttttgagatggagtttcactcttgctgcccaggctagagtgcaatggcacgatttcggctcaccgcaacctccgcctcccgattcaagcgatctcctgcctcagcctcccgagtagctaggattacaggcatgcaccactatgcccagctaattttgtacttttagtagagatgggctttctctatgttggtcaggctggtctcaaactcccgacctcaggtgatctgcctgcctcggcctcccaaagtgttgagattacaggtgtgagccacggatcccagccagcttctctttctttatctataaatagaactgtcgtgaagatgcaatgagatgaattttagctcagagcctgccacctggtgacttacccatgttaggtattgtggttacagctctgctgtcaaaccacttctccaactctctttctagcctcagttcatttgtcaaagggtttggccccagtattttgctggatattcagaagtacgacctcacgtctgcagaatgccactgactttcacacgaggcctcccaggaagggatgccaggcctcagacactagctgttggatctcgggacttgccactccactttggcatttttcaggaccacacggcatacagttgatctaacagtctttcctgtcctcccagtggtcagctgcagcccagttctagggcttctgtgggagaagacaggagagggctgggagtcagggcacacagatgtgtcagatgaggctttgcttgcaaggagctcaccacttgggtggtggagaaggcccagaaggcactactacagtgctcccaaatcaggaaaagattgctaaatgcccgtatactcaggatcacatgggagcccagagttggatgcctggatcagctgggagtctacctgacattgatgatgtttggctagaatactgatggacaaggccaggcgcggtggctcacgcctgtaatcccagcactttcagaggccaaggcgggtggatcacgaggtcaggagattgagaccatcctggctaacacgatgaaaccccatctctactgaaaatacaaaaaattagctgggcgtggtggtgggcgcctgtagtcccagctactcaggaggctgaggcaggagaatggcgtgaacccaggaggtggagcttgcattgagccgagattgtgccactgcactccagcctgggggacagagcgagactccgtctcaaaaaaaaaaaaaatactgatggacgaatgggaggtggcaagaccgacactgagggaagggcatcccaggcacagggaagagcatttaggaaggcttgaaacagtcaggtgcattctgggaactccaagtaattccactcttgagttgagtgagggctaaacaccttcaaatcacaaaacattccagccactggtctcttcttctccctccattccatcctcaatactatagctagatttatcttccttccttcctttctttcttttttaacatggggtttcagccgggcgcagtggctcacccctgtatcccagcactttgggaggctgaggcgggcagatcacctgaggtcaggagttcaagaacagcctggccaacatggagagaccccatctctactaaaaatataaaattagccaggcgtggtggtgcatgcctgtaaccccagctacttggaaggctgaggcaggagaatcgcttgaacctgggaggcagaggttgcagtgagctgggaccatgccattgcactctagcctgggcaataagagcgaaactccatctcaaaaaaataaataaaaaaaaaataaaataaaataaatttggctcctctgattttaaaatcgatcggggtttcctatgacctataggaccaagaacaaactccctctcttgacattgaagactcttcacagccttctcccaaactccttccacctctcctccctaccttttgttatagttacagccacttggatgatttcctgttcttaaagcaggccagtcacattttttgtccagacttctccctctgcctggaatgttctccccttcttccctgggcaaattccccccatcttccaagacccaatgcagaagacaggttcattagaagccccttcagggtacttccagtgcctagaatccagcctgacattttggttgaataattaattaatcagatcaaggacctcttccctgagtacccaacatagcccccctccccaacgcctgtgctccctgcacacctcctccatgctatgttggaacttcttgaagtcaggcttcatttcttttgtttcgtttctttctttgttttctcttctctttttctttttctttctttctttctttttttttttttttttttcgagacaagagtctcactgtcgcccaggctgcagtgcagtggtgccgtctcagctcactgcagcctccacctccctggttcaagtgattctcctgcctcagctgtcggagtagctgggactacaggcacccaccaccacacccggctaatagagacaaggtttcaccatgtcagccaggctcatctcgaattcctgacctcaggtgatccgcccgcctcagcctctcaaagtgctgggattaaaggcgtaagccactgtgcccggctgcgtttcttttttcttttcttttctttctttctttcttttttttttttttttttttttgagacagaatcttgctctgtcacccaggctggagtgcaatggcaccatctcagctcactgcaatctccgcctcccgggttcaagagattctcctgcctcagcctccggagtcgctgggattgcaggcacccgccaccgtgcccggctaatttttgtattcttagtagagacggggtttcaccaccttggccaggctggtctcaaactcctgacctcgtgatccacccgcctcggccttccaaagtgctgggattacaggcgtgagccaccgcgcccggcctccggccgcgtttcttttcttttttagaggagtcaggctggagtgccgtggcacaatagctcactgcagcttcgaactcctgggctcaagtgctcctcccgcctcagcctcctgagtagctaggactgcaggcgtgcaccaccacgcccggctttttttttattattattaatttttttgtagagacgggatcttgttgtattgcccaggctggtctccaactcgtagcctcaagcgatcctcccacctcggcctcccaaagtgctgggattacagctgtgagccaccgcgcctggcacaggcttcatttctgatggtccttcctttttccttgatgcctttctctgtacctggcacatagaggtgcctggtacgtgtttgttgaatgaatgaatgaatgagtgaatgagcgaacatgccatttcaccttatatatcttgtgaacctgccaggcccgggcctgatgtcatagcctctacccctggcccgagtctccagtcccctgcgtgtctgctgaccacagcacgaacgccagcgcactaccctcctcaaccccagcccaggccccttccccgtcggggtccccccaaccctttccccgcccgcttccccgccccggggccgcttagcctccagctcagcgggaggtatccccgcccacggccaggattggaggatggaggcaacgcccaccccgccgggcggcctcctattggcgcggccgtcgccaggggtggggacaggaccggcggctgctgacgccatcccggccagaaaagccctggccagtggcgggcgcgacactatccgtgcggccaggcggaggtgagtgcgcggcggccggatgggcgggacgggcgtggaggacgccgagcaccgtggcgcgcgctcacgtccgcgtccccaagggctgcgctccctcaagcgcagtgcccagaactcggagccagcccggcccgggggaccctgctggccaaggaggtcgtcagtccggtcttgtcttccagacccggaggaccgaagcttccggacgacgaggaaccgcccaacatggcctcggaggtgagtgggacctcggggactccggtcctcctagcctccaaaggagagagtgggggcgccagacctgcctcgggccaccctgctgggaatcgccctccaggaagyaattttgaaaattacctaggaagcctgcacccccagccctcccgggcgcatcatctggagcccagcagtcacctttaccaggactcaccagtatccgcaggcagcccttgtggcaaacccascaacccacactactaggggtagagtggctctgccctcacctcacagtgatgcctgcctggccaggaaaagtggctcccaagccttcagccttccaactcttccttccttcttaccacgtgtcctcctgtcaggtcccaccccacaccacatcccttctcctgctagagcaattgtccctgtttatagaataaagctcagcccctaagtgttcttgtccttgactgtggcatgtggaaagagccaggaaaaaggggacgtcgcctcgtggctccagcaaccctggtgcctggtcccttcctgtctcactggaccctgcctcttagggtcagtggctcctggcctctcctcctgaccactgagatgctggattcccaggcagaggttttccttccttgggccatagttgatttatctggcaatgggggtaataatagctgtcggcctcactctgtaaggcactagattatgaggccattgctttggacccttcaggtgagaggggctgttcgcctgatgcttgatgaagggaactccgggaagcaggaggtctgggttccaggcccttttggccttcattagctagcaattcacttcctctttctcaatgccctgcaagctcagtgccctgcaagcttctgggtcatggcaggggggtagggcctggactttggagccaaacagacttggtttctgtaccagtcacttgagccctttaaacctctttcctcatttgtgaaataggggtaatattgcccacctcataaaaggccgtaataacatatgtgaaatccctagcacagggctgagcaacagtaggtgctcaataaatggtggctaaccacaacaatactgatatttctactttgggaggccgaggcgggaggactgctgaagcccaggaattccagaccagccagggcaatgtaatgagaccctgtctctacaaaaagattttgaaaattacccaggtgtggtggcgtacacctgtagtctcacaggaggcggaggcatgaggattgcttgagcccaggagtttgagactgcagtgagcatgatctcaccactgcactccagcccaggcaacagagtgagatccagtttcaaaaaaataaaaataaaaaaacctggcaggcatggtggctcacacctgtaatcccagcactttgggaggtcgaggtgggcagatcacctgaggtcaggagtttgagaccagcctggccaacatggtgaaaccccgtctctactaaaaatgcaaaaattagctgggtgtagtggtgggtgcctgtagtcccagctattcgggaggctgaggcaggagaatcgcttgaactcgggaggcggaggttgcagtgagctgagatcgcaccactgcactccagcctgggcgacaaagcaagactccacctcaaaaaaagaaaaaaaacccacaagtcccaaaaccaaaactggtatttcccatgtacattcgaccttaactgttgctcattcaacccagcccaactcagtgccccatcccctggccctgaagagaccattctggcccagatgtgtcctggcttggagtagcaccttctgctaccacactrggcctccactctcctcagtgcccaaggggaggcacctcactctgatctccctgtggggtcctcttatgcctgccagtaaggataggagtttggttctagagcagagtggtctggcttccaacaagcccagtgttctaggtgacctcaggttgccccaggccttcctgtaggttggcactaattggtttggctgcagctccacttattaagtagttatttttattactaacaacctaggcagggtggcccaggagcccgctgggggaggcggtgccaggctcctggctgaggggcaggctggcccyaattctgactggctggctccagtgatcaggaccagggccccacgtggtgctttgctggagatctaggcttggtggggcagctgtggggtaaggggcaggaccagctcaaagatggggtgggggcggaggctgcctctgcagggcagagtcctttggcagtcgggactgttgggcatagaggagtmagctcacagctcagggccagagcactggagaggtctctggggtgcatacaggaaccaggagtggagctgaagcatgtcctatcccctgccagccctcccttagtaacagctggcatttctcgagtccttcctgagcaccaggcaccgtgttatgtatgcaatttgcaaatattatctgattaaatgctcacaataaggctatcagagaggtactattattatccttatcttattattattattattattatttttaagaaggagtcttgctctgtcgcccaagctggagtacaatggcgccatctctgctcaccgcaacctctacctccaggattcaagtgattctcctgcttcagactcccaagtggctgggactacagcttcctgccaccgcgcctggctaatgtttatatttttagtacagatgaggtttcaccatgttggccaggctgatctcgaactcctgacctcaagcgatccacctgcctgggcctcccaaccctgagggtttttgtttttgtttttgttttgagacagagtcttgctctgtcgcccaggctggagtgcagtggcacgatctcagctcactgcaagctccgcctcccgggttcacgccattctcctgcctcagcctcccaagtagctgggactacaggcgcccaacacccccatgcctggctaatttttttgtgtgtgttttcagtagagacggagtttcaccatgttagccaggatggtctccatctcctgacctcgtgatctgcccacctcagcctcccaaagtgctaggattataggtgtgagccaccacgcccagcccctgaggtttaataataggtgccaggccaggtggttaatagaagtctggggcattgtagggggacagaggaggatatatgtccccattggccattgtagactcccttccacaaaaaggacgtcagtgaagtgacatgcccacctctaccccaccctcctcccagtcctgggcactagggctgctccccaggtgttctgtaccccctccccactctgtcccatgccctggcctctgccctctttcaaaacatagatgtggctggcgcctaggctcatgcctataatctcagcactttgggaagctgaggctggaggacagcttgagcccaggaattcaagaccagcctgggcaacatagtgagaccctgtctctaccaattattttattttattttattttgttcatttatttatttattttgagacagagttttgctctgtcacctaggctggagtgcagtggcgtgatcttggctcactgcaacctccgcctcccgggttcaagcgattctcctgcctcagcctcctaagtagctggaactacaggcgagtgccaccacgcctggctaatttttgtatttttagtagagaccaggtttcaccatgttgaccaggatggtctctgtctcctgacctcatgatccacccaccttagccttccaaaatgctgggattacaggcatgagccaccactcccagtcctataaaattttaaaaaaatgtctgggtgtggtggcgcatgcttgtagtcccaactattggggaggctgaggcaagaggattggttgagaccaggagtttgaggctgcagtgagctatgatggtgccaccgcactccaacctgggtaacaaagtgagaccctgtgtctaaaaaagaatttaaaggccgggtgtggtggctcacacccgtaatcccaggactttgggaggccgaggtgggcagatcacgaggtcagattaagaccatcctggctaacaaggtgaaaccacgtctctactgaaaaaaaaaaatacaaaaaattagccaggcatggtggtgggcacctgtagtcccagctactcaggaggctgaggcaggagaatggcgtgaatctgggaggtggagcttgcagtgagccaagatccygccactgcactccagcctgggtgacaaagagagactccatctcaaaaaaaaaaaaaaaaaaaaaagaattaaaaaagatttttttaatgaacaaaacaggctcggcacagtggctcatgcctgtaatcccaagcacttcgggatgccaaggtcaggggatcacctgagatcaggagttcgagaccagcctgaccaacatggtgaaaccccgtctctactaaaaatataaaactcagccaggtgtggtggcacacgcctgaaattccagctactcgggaggctgaggcaggaaaattggcttgaagccgggaggtggaggttgcagtgagccgagatcacgccactgcactccagcctaggcaacagagtgagactctatctcaaagaaaacgaacaaaacatagatgcctacataccattcctctgcccttggctcctggggagtaagggatcacccagtgacctcctagaaggccagtgacaatggggggtgtcagggtgcttttcagagccaagggagtggtaggaattgggatcttagtccagctccaagctgtgagggagagagttgcagggcacttaagcttggtggagaccctcaaggcctctttgcctgtccctgcagcaaaggttctggacaccagagccaagtccagaagccctggtggaacaggggtgaaaagcataggttctgacttcagactgctgggccgcagccctggctatcccacccyaggtgagagcaggctgctctgtgcctcagtttccccatcttcatagtggaattgtattggtgcctacccagagggttgtgtcaacaattaggatggcacctagcaccttggtcagtggtgggaaaggttccagaagttctgctgtggtcccaggggtgtctcaggccctgccatcatctccttggaggggtgccatgtggtgggaaagaaccccaacttcaaggccacacacagtggctcatgcctgtaatcctagcactttcagaggccaagatgggaggatcacctgaggtyaggagttcaagaccagcctggccaacatggtgaaaccccatctctactaatgatacaaaaattagctgggtgtggtggcacgtgcctgtaatcccagctacttgggagtctgaggcaggagaatctcttgaacctgggaggcagagtttgcagtgagctgagatggcaccactgtactccagcctggccgacaaagtgagactctgtctcaaaaaaaaaaaaaaagaacccaaacttttggtgttcagccatgttcccatgctcactcccagggtggtgactctgggaaggtctcagcctccttgtctgcccagttagaatgatctgatgcccctgctaccatcagacttgataagtttcccaaagactctttgcaagaagcactgttctggagggtggaggagagactaattgttcttgctctcctggccagagtgggaagctttggggtggccggtttgtgggtgcagtggaccccatcatggagaagttcaacgcgtccattgcctacgaccggcacctttgggaggtggatgttcaaggcagcaaagcctacagcaggggcctggagaaggcagggctcctcaccaaggccgagatggaccagatactccatggcctagacaaggtacttgccgtggcccaagccccacccaaggccccttccctgtggccccaggctcccaccaaatccctgagcaaacagtgcagtgttgcccatctgtggtttcacattgaactaattatatactcaagtgctgtttaactgtgtgccttgatgactgcctctctccatcctttaatgacccctgtggcccacatggctcatgggtaaaggtgtgctgggcctgagatgccccctcccagggtgcgcttccaggactcagctcctgggcagggacagtcagtcaccagggatagggtgggaccaaggcaggggctctcttggctgctgatgcctgctcacctgaccccggcattgctgctacccactacaggtggctgaggagtgggcccagggcaccttcaaactgaactccaatgatgaggacatccacacagccaatgagcgcygcctgaaggtacgacccctggagccccaccgctttccttgcctcccctctccaccttgcccagggccactttgagcattagcaccattctgtttacttcgccattggcagacagcatgtgagacctcaggacatgagccaggcaccctggctcatgcctataatcctagcactttgggaggctgaggtgggaggattgcttgagaccaggagttcgagaccagcctgggcaacataatgaggtcccacagctacaaaaattaaaaaaagaaaagaaaaaaagaacaggcctcagcagaaatggcgagagatttggggaggacccggagccctggggtatggaggtaggttggcagggctgatgaggaaaactgccctgcctgggttgactcctctgggggtatagaccgtgaccctgggtctcccttcacctccaggagctcaytggtgcaacggcagggaagctgcacacgggayggagcyggaatgacyaggtgctttagcccctccaccccctgctccgtgttgtcccaaccttgaggagcccagggggcagttagagttctgcagcggtcctggctcctcagggaagcaacacatcggcctccctgagcaccatctcctccttgcacaggtggtcacagacctcaggctgtggatgcggcagacctgctccaygctctcgggcctcctctgggagctcattaggaccatggtggatcgggcagaggcgtgagtcctacagggacacccagggggcagacagaggtgtgatggaagcctgaacaggagacctagggggcaggggtgaacagcgtgggggtgccaggccctgggggacaggggcatcccagaactccaggatcgaggcagagcagccaggagtgggccatttcctgcaggccccaatactcccatgccagtctagctcagcaggcagagaagactaacccttcgtggggctgggtgcggtggctcacgcctgtaatctcagcactttgggaggccgaggtgggtggatcacctgaggtcaggagttcgagaccagcctggccaacatgggraaactctgtctctactaaaaatacaaaaattaggcaatgtggtggtgtgcgcctgtaatcccagctactcgggagcctgaggcagaagaactgcttgaacccgggaggaggaggttgcaatgagccgagatcgcgccattgcactccagcctgggctacagagcgagactcctgtctcaaaaaaaaakaaaaaaaaaaaagaaaactcaccatttgcagatttgaaggcaggaagctaagccaagcacagctagcttggctgtgcctggagcagccagagtcactccccacactgcctgtcccccagatcccccatcctaagcttcgcctccccatccagcccatctggcaaaagacagagccaaaggctgcctcctgctggcctcatttcaggctttggcttctgggacctggtgtctttgggactggatttgttccttgcagacctggacgaagagctgctgagaagtctccatgtgttgtcagagacccctcctcttcctcaactccctgtgacccctgttgtgcagacttgggggaaaacaagggcacaagaattgtcacccagcaggtggtgtggggctgctaggaggaacagggagtgtctgctactgagttcagggtttctttaattttttgttgttgttgtttgttgttgtttttttttttttgagacagggttttgctctgtcacctagtctggagtgtagtggcgctatctgagctaactgcaaactctgcctcctgggttcaagtgattctagtgcctcagcctcccaagtagctgagattacaggtgtgcaccaccatgtccagctaatttttgtatttttttcagtagagatgggttttgccatgttgaccaggctggtcttgaactcctgagctcaggtgatctgcccgcgtcggcctgccaaagtgctaggattacacccataagccactgcgctcagcttaatttttaaatttttaactttttaaattgtctttagagatgagatcctgctctgtcacctaggctggagtgcaatggcttggtaatagctcactgcagtctcaaactcctggactcaaatgatcctcccacctcagctttctgagtagctaggaccacaggtgtgcaccacctgtgagacagagtcttgctctgttgcccaggctggagtgcagtggcgtgatctccactcactgcaacctctgcctcccaggttcacgccattctcctgcctcagcctcccgagtagctgggagtacaggtgcccaccaccacgcccggctaattttttgtatttttagtagagacggggtttcaccatgttagccaggatggtctcaatctcccgacctcatgatccacccacctcggactctcaaagtgctgggattacaggtgtgagccaccgtgcccagccgcgaattctttaaattttttgtagaaacagggtctcactatgtggctcaggctggtctcaaactcccggccttaagtgatccttccctcttggcctcccaaagtgctgggattaaagacttgagccaccgtgcctggccttgagtacagaatttcttcatggggtgatgaaaatgttctaaaattggttgtggtgatggttgtacagtaaagtgtaaactttaaatgagtaaattgtgaatgatatctcagtaaagctggtttatttaaaacaacaggccaggtgctgtggctcacgcctgtaatcccagcactttggaaggctgaggcgggtgaatcacctgaggtcaagagttcgagaccagcctggccaacatggtgaaaccccatctctactaaaaatacacaaaattagctgggtgtgatggtgggcacctgtagtcccagctacttgggaggcaggagaatctcttggacctgggaggtggaggttgtagtgagccgagatcacgccactgcattccagcctgggcaacaagagcgaaactctttctcaaaaacaacaacaacaaaaaaacaggccaggtatggtggctcatatctgtaatcccagccctttgggaggccaaggcaggaggactgcctgaaaccaggagtttcagaccactctgggcaacatagcaagaccccatctttttttttttttttgagacggagtctcgctctgtcgcccaggctgaagtgcaatggtgcaatctcaactcactgcaagytctgcctcctgggttcatgccattctcctgcctcagccctcctgagtagctggaactacaggcgcccaccactacgcccggctaattttttgtatttttagtatagatggggtttcaccgtgttagccaggatggtctcgatctcctgaccttgtgatctgcccgcctcggcctcccaaagtgctgggattacaggcrtgagttaccgcgcctkgccacaagaccccatctttacaaaaaactaaaaattagctgggcatggtggcatgtccctttagtcccagctactcaggaggctgagacaggaggatcgcttgagcccaggagatcgaggcagcagtgagctatgatcatgccactgcactccagtctgggcaacagaacgagaccttgtctctaaaaataaaaacaaaacaaaacaacaagaaaacaggaccatcactcacagcacctctgcctctgccctgcctacttgaatgaggtgcagggcatctcacctgctcagagcagcccttgaatgagccccagctatttctagggtcctcaaaygaaacctcccacggccaagtcatacccaacatgggcctcctcccctattctggcccctgctcggagatgctgagtgacagaggctggacttggggtgtttctggcaaagcctcactgcaggaagccccacagctcaggcccagtccttggttcacacrgtcccacttccagcttcttttgcccttaagactgatttgtccctgggagatcaccagatccctcattcaggtggagtgctgcagcgtgacactttttccaggggtgacccaggcctgcagggttccagtgtcacaggcaggccttgcatgagcctccacccgagcttctgctcctcctctcccacagggaacgtgatgttcycttcccggggtacacccatttgcagagggcccagcccatccgctggagccactggattctgaggtgagccaggtgaggtgcaggggctgtgctagaggggaggaccccggctgccctgaccctcctgcccctggcttcccacagccacgccrtggcactgacccragactctgagcggctgctggaggtgcggaagcggatcaatgtcctgcccctggggaggtgggtgaggctycagtgccccgagggcctggtgggggtggctgctgcatagccttagggattgacagagctgggaagtgcagagtgggacagaaaaccgccttatctgctcagcgggggacyctgcatggagccccagctctcgctaaggtgacgaccaagccattgaatgtgtctgagcagggccagagccctccagcaaggctcctggcaagcccagcctgctgccctcagcctgacatgtgggaacatgtgtcaggagacaagtgtcctgcacccagggtgacttagtgcttggggacaagtgttttgtggacacttggggacaagtattctgtacccaaggagactgggccagggaagaggctaagcgccaggtggttgccctggcaaccaggacttggttctctgtgtgtgcgttcgtgtgtgtgtgtgtgtgtgtgtgtgtgtgtgtgtgtgtcagggctgcctgccaggagccctggtcaccatgaatccctgtccctgcagtggggccattgcaggcaatcccctgggtgtggaccgagagctgctccgagcaggtgagacgtcctgcccctcctccccagggagaatcaccctcagcacccgccaagacctgcagacacacctgaaaccagagggcaggggcctgtggctcctggtgaaaccttcattcattgcctntgggcactgaggtcatcaagttcaggggtcactcatggcagggatgcctggtactgagagactcagggctcctgcctccctcctgggactgtgcaaaagatccctccccccagctgntgccccaccctgatcaggggagggggctgggcaacctagttgggggagagggggccactccctgtcctccagcttagccctgcttcctcccacccccccagaactcaactttggggccatcactctcaacagcatggatgccactagtgagcgggactttgtgggtgagtcctggggagccagtcccctgccctgtgcctcactttagtccttcagcccagcttctctccagtttcctcccacacctccacggacaggctggttgtggtgatattgtacactgaagtataaaccttaaatgggtaaagtgggtggggcatggtggttcaccatgcccagcactggccaacatggtgaaaccccatctctactaagaatacaaaatttagctgggtgtgtggtggcaggtgcctgtaatcccagctactcaggagttctgaggccagagaatcacttgaacccaggaggcggaggctgcagtgagccaagatcacgccagtgcactccagcctgggcaacaagagcgaaactccatctcaaaaaataaaataaaataaaataaaaataaataggccaggcatggtggctcacgcccgtaatcctagcactttgggagtccgaggcaggtggatcacatgaggtcaggagtttaagaccagcctggccaacatggtgaaaccccatctctactaaaagcacaaaaattagctgggcatggtggtgcatgcctgtaatcccagctactcgggaggctaaggaaggagattcgctggaacctgggaggtagaggttgcagtgagccaagattgtgccactgtactccagcctgtgcattgggagcgagactccatctcaataaataaataaataaataaatggataaattgtatgtgagtgataactcagtaaagctggtttatttaaaacaacaacaataacaaaaaacacgctaggtgcaatggcttacgtttgtaatcctagcactttgggaggccaaagcagaaggattgcttgagcccacaagtttcagaacagcttgggcgacatagcacgaccccatctttgcgaaaaatgaaaatttagccgggtccccccaccgcctaacctcctcctgccccctgtatggtcaggctgggtggggatgggagaggcctggtgactgggaaccttttctcccagccgagttcctgttctggssttcgctgtgcatgacccatctcagcaggatggccgaggacctcatcctctactgcaccaaggaattcagcttcgtgcagctctcagatgcctacaggtaagccctgaactgccacctccatctgccgctgccggcctctgtatcccccgccgcccgcggacgtggctgccttcctccccgtcccacccctccgccagacctggccattgcggcgctggaccagccaagggtccagccccttcagcgccagcacctctgtccccagcacgggaagcagcctgatgccccagaagaaaaaccccgacagtttggagctgatccggagcaaggctgggcgtgtgtttgggcgggtgagcaaggcagggggaggggcggggcctctgggctgatggtgggtggccaggggggcaggatcccgggtccagcccctgtgcctccctcttcccgcagtgtgccrggctcctgatgaccctcaagggacttcccagcacctacaacaaagacttacaggtgcgaggccgggggaggcctggctagtaygtgccagttctcagggctctggcacactcaggyagggccccaccccgggattgccatacatcctcccatcctgtgcacacagctccatccgtggctgcccttgaactctctgcccttcctttgttggggtattgagtgttcttcccatggaaggcagtggggatgcctcagtgggggggtggggctgtggggaccctgggtgccagggggctgctaggccctcacctcctgccatgtgcctcccaggaggacaaggaagctgtgtttgaagtgtcagacactatgagtgccgtgctccaggtggccactggcgtcatctctacgctgcaggcaagacatcacccccctgcttctcctcccctaggtcccaggcactggggtgggcatgcggggagggtggccttgggaggaggtgaggtggggctggaggacctggggcagggaaggagaggtgtgctcgctcctgctcctggggaacagggaaaggacagaaactgctgccatgcagtggaagtagatgagactcagggggcctggggcctgtcaaatggcctgaccagaactctttaaaaaaagaaaatctaaacaaaaggccaggtgcagtggctcatgcctggaatctcacactttgggaggccgaggcagatggagcacttgaggtcaggggtttgagaccagcctggccaacatggcgtaaccacgtctctactaaaaatacaaaaattagccaggygtgatggcccacacctgtaatcccagctactcaggaggcggaggcagaagaatagcttgaacccaggagatggaagttgtagtgagccaagatcatgccgctgcactccagcctggaccacagagtaaaactccatctacaaatatataaattaaattaaattaaattaaatatctttaaaaaacattttttagagacagggtcactctctgtcgcccaggctggagtgcagtggtgcggtcgtagctcactgcagcctcaaactcttgggctcaagtgatcttcccacctcagtctccagagtagctgggactacaaacatgcgccaccacgcctggctaatttttttattttttgtagagacagggtctccctatgtttcccaggctggtctcaaattcctggccccaagccatcctcccaccttggtctcccaaggtgctgggattataggcatgagccactttgcctggctgatttcttttaaaatcaattattatgggaaatttatgtatataacagctagagaatgcataatgaaccctatgtaccgacacccagcttcaatgataatcaactcacggacatcctggctccagctgtctttacccacagctctctcccactcccttacccccttattttgaagcaaattcccatcatcacatcatttcattcctaaatagttcaggatatgtcttgaaatcagtgtttcttggctgggtgcagagcctcatgcctgtaatcccatcaatttgcgagactaaggtgggcagatcactcgaggtcaggagttcgagaccagcctggccaacatggcgaaaccccgtctttactaaaaatataaaaattagctgggtgtggtggtacacgcctgtaatcccagctactcaggaggctgaggcaggagaattgcttgaacccgggagatggagactgcagtgagcagagatcacgccactgcgctccagcctgtgtgacagtgcaagactccatctcaaaaaaaaaaaaaaaaaaaaaagrcagtgtttctggaggctagtcccccaactagcagcaccagcatcacctcagaagtcctgagaaatgtgatgtgaggccccactccagatggctgaatcagagactctgggggtgctccccagcaatttgtatttttcttagtaaattctccagtggctaggcctggtggctyatgcttgtaatcccagcactttgagargctgaggcaggagaagcgcttgagcccaggagttcaaaaccagcctgagcaacatagcgagaccttgtctgtaaaattaaaaaaattaaattagccagtcgtgatggcgtgtacctgtggtcccagccacttaggagactgatgtgggaggatcccttgagcccaggagctcaaggatgcagagagccaggattgtgccattgcactccaacatgggcgaccctgtctcaaaaaagcccaaaacaacaacaacaaattagctaggcacggtggtgtgcatggctgtagtcccagctacttgggaggctgaggctggaagatcccttgagtccaggctgcagagggctataatggccactgcactccagcctggacaacagagcaagaccctgtctcctaaaacagaaaacaaatcctccaggaacatctgatgcatgctgaagataaggactctttgaaaacataaaggccagtaaaacatacaggccagtaagtgttcatagcacatgtaaatattatcgataattatgagaagatggttcaagttgagagtgagacagagccgagtgggtaagagagtatctgcccaaggcagggatgtcctggcagaggggcaggtcctgggcctsgcagcttcagatcccagggtccccagggctcaccaytcgcccacctgtgcccccagattcaccaagagaacatgggacaggctctcagccccgacatgctggccactgaccttgcctattacctggtcygcaaaggggtaagtgtgtagcagccagggggagggtgaggagatggggtgccccccccagagggtgggggagctcaggaatgggtgcaagcggcccagcctggtggctcacccctgtaatcccagcactttgggaagccgaggtgggcgggtcacttgaggccaggagttcgagaccagcctggtcaacatggtgaaaccccgtctcttttgatgtaaaaatacaacaattagctsggtgtggtggcacactcctgtaatcccagttactcgggaggctgaggcaggagaattgattgaactgggaggtggagtttgcggtgaggtgagatcgcgccactgcactccagcctgggcaacagagcgagactttgtgtcaaaaagaaaaaaaaaaaaaaaaggaagggggtgcaggcaatggaggcagatcagggcatggagaaacctgcctcagcgccatcttcctccctggcacccagatgccattcygccaggcccacgaggcctccgggaaagctgtgttcatggmcgagaccaagggggtcgccctcaaccagctgtcactgcaggagctgcagaccatcaggtacggcccatccccttccccatgctgcctcctaggaagtgagcctgggtgcctggarcccagggtggcctggcgccctggcccacctcttcctctctccccagccccctgttctcgggcgacgtgatctgcgtgtgggactacgggcacagtgtggagcagtatggtgccctgggcggcactgygcgctccagcgtcgactggcagatccgcyaggtgcgggcgctactgcaggcacagcaggcctaggtcctcccacacctgccccctaataaagtgggcgcgagaggaggctgctgtgtgtttcctgccccagcctggctccctcgttgctgggctttcggggctggccagtggggacagtcagggactggagaggcagggcagggtggcctgtaatcccagcactttggaagggcaaggtgcgaggatgcttgaggccaggagtttgacacagcctgggcaacacagggagacccccatctctactcaataataaaacaaatagcctggygtsgtggcccatgcatatagtyccagctacttgtaaggctgaggtgagaggacacttrtgcccaggagtggaggctgcagtgagctatgatcacgccactgcattccagcctggataacagagtgagaacctatctctaaaaataaataaataaacgaaaaataaatggaagcggagaaaactgggcaagggcaatgagagtcgtagacgggaagggaagagggggctcccatcatagcctctgctctgtccaggccccatccccttcagacagggtatcacagtgacctcctaggccaggagcgatggctcacgcctgtaatcctagcattttgggaggcctgggcaacaggaagactccaactaccatattaaaaaaaacatgaatgaaagcaaaaacaaaacaactagccaaactgggcgcggtggctcacacctgtaatcccagcactgtaggaggctgaggctggtggatcacttgagaccaggagttcaagaccagcctggccaacatagtggaaccccatctctaataaaaatacaaaaattagccgggcgtggtggcgcatgcccataatcccagctattcgggaggctgaggcaggagaattgcttgaacccaggagacaggttgcagcaagccaagactgcattactgcactccagcctgggccacagagcaagactctgtctaaaaacaacaacaaaaactagccagttgtggtggtatgtgcctatagtcccagctacgtggaaggctgaggcgggaggattgcttgagcccagcagtgggaggctgcagtgagctgtgatggcaccactgtcctccagtctgggaaacagagcaagaccctgtccctaaaagacaaaaaataagaaatgtctgaaacttatattttattaacaacaaagacaaacaagctaaactcaaggaagaatgaataacccctaccacgtgattttgggagcaatgacagattttgttaaagaaccaaggctgggtgcagtggctcacgcctgtaatcccagcactttgggaggccaaggcgggcagatcacctgaggccaggagttcgagaccagcctggccaatatggtgaaaccccatctctactaaaaatacaaaaaaaaatttcctgggcgtggtggtacatgcctgtaatcccagctacttgggaggctgagggagaagaatcacttgaacctgggaggtggaggttgcagtgaactgagattgtgccactgcactccagcctgggtgacagaagtagactgtgtctcaaaaaaaaaaaaaggaaccaaaagccagaccccagcagtgaggatgtgacaccaaatccccaaaagggtcaaagctctgggtcacagataaaatcttccagagcagttgttctcagactgtcattcctggccatcataattttcaccaaggagcttagaaatgcaaactttctggctgggcacagtggcttatgcctgtaatcccagcactttgggaggccaaggcgggcagatcacctgaggtcaggagttcaagaccaacctggtcaacagggtgaaaccccatctctaccaaaaatacaaaaattagccaggcgtggtggggaatgcctgtaatcccagctactcaggaggctgaggcaggagaatcacttgaatctaggagggggaggttgcagtgagccgagatcacgacactggctccagcctgggtgacagagcaagactctgtttcaaaaaacaacaaaaataacacagtgacctaagaaaaaaaagaaaagaaaaaagcgtggcatgatggtgtgcacctgtaatcccagctactcaggaggctgagccaggattgtttgaggctaggagttcaagaccaaccttggcaacattgtgagactctgtctcattgggggaaaaaaaatgacctcctgccttgggtgtcattggcaggactggtgggacctgatgggtatgggtggccccgtcagtcactgtccatctcccttctttcccagcgtcccctgggctccccctgccctcattcaccccttgctgaacctaccctttcctggaccattcaggcaccatcacgggtattgctcaggctgaggcctgtaccagcaccgcaagggtgacctgtgacctcctaaggggcatggtgtatggagtggtaaggtcagccatccagctagtatgtgatgccagccactgggttagcttcctgcaaaacagacacctcctctaccctagagagtgatgtacagataaattcccccacattgaccttgaggggagggtgactgggatgcagggcctggaggggacctgcaccttgctgcagtcaagggaggcatggctacaccaagcctgcagagagccctgaggccaggccaggcacacggcaagtgttcagtagagagcccgtggtgacacagagacctcttctatgcaaatctcaccaaactcctgataagagatgtctgaaattagaggccaagtacggtggtttatgcatgtaatcccgacagtttgggaggccaaggtgggaggactgcttgaagccaggagttcagttcaataccagcctgggcaacatagcaagatcccagctaccacattaaaaaaaaaaaaaaaaaacaggccgggtgcggtggctcacgcctgtaatcccagcactttaggaggccaaggcaggtggatcacaaggtcaggacttcaagaccagcctggccaagatggtaaaaccccatctctactaaaaatacaaaaaattagccaggcactgcctgtagtcccagctactcgggaggctgagacgggatactggcgtgaacccgggaggcagagcttgcagtgagcggagatcacgccactgcactccagcctgggtgacagagcgagactccgtctcaaaaaaaaaaaaaaaaaaaagctggatgcagtgccagacacctgtaatcccagctactcaggaggctaaggcaggagaattgcttgaacccgggaggtggaggttgctgtgagctgagattgtgccattgcactccagcctggggaacaagagcgtgacttcacctcaaaaaaaaaaaataaaccaagccaagccaggcacagtggctcacacctgtaatcccagcacggtgggaggccgaggccagtggatcacttgatgccaggagttcgagacgagcctggccaacatattggaaccccatctctaataaaaatacaaaaattagccgggcgcagtggtgcacgcctgtagtcccagccactcaagaggctgaggcacgagaattgcgtgaacctgggaggtggaggttgcagtcagctgagaccatgccactgcactccagcctaggtgatagagtgagagtccttctcaaaaaaaaaaaaaaaaagaaaagaaaaaaacagccaaactttttaaataatttcattttatttttaaaaaatcgagatgggctctatgtttcccaggctagtctcaaactcctgagctcaagccttccacctgcctcaccctcccaaagtgctgggattacaggcatgagccaccacacccggcctaccatgaatttaatggctcaacatgtgtaatctgataattctggacatcacaagtctgaaattggttttactgagaagaaatcaagtgtcagccaggatctagaggaggatccatttccttgttttttccattttctagaggccacctgcattccttggcttgtagttccttcttccatctgcaagaccagtggtgtagcatcttcaattctctctctgcttccattgtcaatctttttttgtttgtttgtttttatttttattttttgagacatagtctcactctgttgcccaggctggagtacaatggcgcaatctcggttcactgcaacctcctctgcctgggttcaagtgattctcctgcctcagcctcccaagcagctgggattacaggcacctgccaccaggcctggttaattttttttgtatttttagtagagatggggtttcgccatgttggtcaggctggtcttgaactcctgacctcaggtgatccaaccacttcggcctcccaaagtgctaggattataggtgtgagacaccccgcccagcctagtgccattacttttttttttttttttttttttgagacggggtctcgctctgtcgcccaggctggagtgcagtggcgtgatcttggctcactgcaagctctgcctcccggattcatgccattctcctgcctcagcttcccgagtagctgggactacaggcgcctgctaccaggcctggctaattttttttttgtatttttagtagagacggggtttcaccgtgttaggcaggatggtcttgatgtccttacctcgtgatccacccgcctcagcttcccaaagtgctgggattacaggcatgagccaccgcgcccagctgtgccattactttcaatggcaaaaccggcaattacttttggacggatacaatagtaacatcaaggatcactggtcatagatcagcatgacagatattattacaataataggctggcgcggtggctcacacctgttatcccagcactttgggaggccgaggcaggtggatcacctgaggtcagaagttcaagaccagcctgactaacatggtgaaaccccatctctactaaaatgctaaaaattagctaggtgtggtggtgcacgcctctagtcccagctacttgggaggctgaggcagcagaattgcttgaaccccagaggtggaggttgcagtgaaccaacatcatgccattgcacaccagcctgggcaacaaaagcaaaactctatctcattaaataaataaataaagcctgagcaacaagagtgaaactctatctcaataaataaataaataaataaaacaataatcctgggcacagaggctcacgcctgtaatcccagcactttgggaggctgaggcgggtggatcacctgaggtcaggagtttgagaccagcctggccaacatggtgaaaccccatctctactaaaaatacaaaacttagctggacatggtggcgggcgcctgtaatctcagctactcgggaggctgaagcagaattgcttgatcccaggaggcagaagttgtagtgagccgagattgcaccattgcactccagcctgggtgacaagagcaagactctgtctttaaaaaaataaataaaaaaatagtggctgggcgcggtggctcatgcctgtaatcccagcactttgggaggccgaggcaggtggatcacctgaggtcaggagttcgagaccagcctggccaacatggtgaaaccctatctctactaaaaatacaaaaattagccgggtgtggtggcgggagcctgtagtcccagctacttgggaagctgaggcaggagacttgcttgaacccgggaggcagaggttgcagtgagctgagatcatgccactgcactccagcctgggtgacagagggagactctgtctaaaaataaatgaataagtaagtaaataaataaataaatacatacataagaaagaaggaggagtgggggggggaggaggaggaggaggaacgggaggaaacagccaggccgtggctcatgcctgtaaaggaggaagaggaggaggaagaaacagccaggcacagtggctcaagcctgtaaaggaggaggaggaaacagccaggtgtggtggctcatgcctgttaaaggaggaggaggaggagaaggaagaggaggaggaggaggaggaagaaacagccaggagcagtggaggagcaggagatggaggaggaggaggaagaagaggaggaggagaaagaagaggaggtggaggaggaggagtggaggagaggagaggaggagaggaggaggagaggaggaggaggagaggaggcggagaggagaggaggaggagaggaggaggagaggaggaggaggggaggaggaggagaggagaggaggaggggaggagaaggaggggaggagaaggagcggaggaggaggggagtagaaggagaggaggagaggaggcggagaggagaggaggagaggaggcggagaggagaggaggaggagaggaggaggagaggaggaggaggggaggaggaggaggggaggagaaggagcggaggaggaggggagtagaagga

SEQ ID NO: 94235 - DNA, 12672 bp, Homo sapiens
actatgagcaactatatgccaataaagtggaaaatctagactaaatagagaaactcctctacacatatgacatatcaagactgaaccatgaagataatccaaaacctgaaaagaccaataaaaagccataataaaaagtctcccagtaaagaaaagcctgggacctgatggcatcactgctgaattctaccaaatatttaaagaagaactaatatcaatcctacctgaactattctgaaaaatacaggaggaagggatacttccaaactaattccatgaggcctgataccaaaatcagacagaaacaaattaaaaaaaaacaggccaatatctctgataaatattgatgcaaacatcttcaacacactactagcaaatcaaattcaacaatacattaaaaagattattcatcatgaccaagtgggatttatccctgggatggaaggatggttcaacagtggtgatacatagtatcaacacaatggaggacaaaaaccatatggtcatttcacttgatgctgaaaaagcattggataaagttcaacatgccgtcatgataaaaaccttcaaaaatgggtatagaaggaacatacctcaacataataaaacccatatataacagacccacagctagtatcataccaaatagggaaaaactgaaagcttttcctctaagatctgaaacatgacaaggacgcccattgtcaccactgttattcaacatagtactgcaagtcctagttagagcaatcagacaagagaaagaaattaagggcatccaaattggaaaggaagaagtcaaattaccrttgtttgcagaggatttgatcttgtgtttggaaaagcataaagattccacaaaaactataagaactgataaattcagtaaagttgcaggatacaaaatcaacatacgaaaatcagtagcatttccacatgccaacattgggcaatctgaaaaagaaatttaaaagtaattccacttacaatggccaaacataaaattaaatacctagcaattaactcaaccaaagaagtgggagatctctttaataaaaactgtagaacactgatgaaagaaattgaagaggacaccaaaaaatggaaagatagtccatgttcatgaattgaaagaatcaatattgttaaaacgtccataccacaaaaagcaatctacaggttcaatgcaatacttataaaaatacaaaaaacattcttcacagaaatagaaaaaacaatcctaaaatttatatggagccacaaaagacccagaataaccaaagctatcctaagcaaaaagaacaaaactggaggaatcatattacctgacttcaaattatactacagaactacagtaatcaaaacagcatggtattgtcacaaaaacagacacatagaccaatgaaagataactgagaacccagaaacaaatccacacacctaacaaactcattttccacaaaggtgccaagaacatacactatggaaaagacagtctcttcaataattggtgctgggaaaactggatatccatatgcagaagaatgaaactagatagctatcttttgccatacacaaaaatcaaatcaaaatgtattaaagacttaagtcaaagacctcaaactatgaaactacaacaagaaaatatgggaaaaatctccaggacattgatctgggcaaaaatttcttaattaataccccacaagcaaaggcaatcaaagcaaatatgaacaaatgggatcacatcaagtaaaaagcttctgcacagcaaagcaaacagtctacaaagtataggtgcaatgggagaaaatatttgcaaactacacttttgacaagaaattaataaccaaaatatataaggagctcaaacaactcaataggaaaaaatctaataatttgatcaaaattgtgacaaagatttgaatagacctttctcaaaagaagatatacaaatggcaaacaggcatgtgaaaaagtactcattgtagttgatcatcagggaaatgcaaatcaaaactacaatgggatattatctcacttcaattaaaatggcttatatccaagtgacaggcaataacaaatgctggcaagaatgcggagaagagggaatgcttgtacactgttgatgggaatgtaaattagtacaaccacaatggagaacgatttgaagattcctcaaaaaactaaaaattgagctaccatatgacccagcaatcccactgctgggtatataccccaaacaaaggaaatcagtattatcaaagagatatctgcactcccatgtttgttgcagcactgcttacaacagctaagatttagaagcaacctaagggttcatcaacagatacatgaacgaagaaaatgtggtatatatacatagtggagtactaatcagtcataaaaaagaatgagatctagttatttacaacagcatggatggaactggatatcattatgctaagtgaaatgggccaggcacagaaagacaaacatcacatgttctcacttatttgtggaatctaaaaatcaaaacaattgaactcatggagatggagagtagaaagatggttaccagaggctgggaagggtaatgggtggtgggggagagtggggatggttaacgggtatacaaaaagaatgaataagacctattatttgataggacagcagggtgactatagtcaataataatataactgtataattaaattgtctgtaacacaaaggataaatgcttgaaatgatggataccccattgtacatgatgtgattattacactttgcatgtatcaaaacatctcatataccccataaatgtatacaactactaggtacccagaaagattttacaaaattaaaaagacccagcaaacaaaaaaaatttacattcaaaaagataaaaagagttcctaaaattgtaaaatatgtatctattctagacttgtatgtacatactaacaatgcctcaagtatacaaagcaaaaattgtcaaaagtgtaagaatttgacaaatacacaaatacagtgggagattttaactctcttggtaactgataggtccagcaaacaaaaaacttaggaatagagaagatttaaacaacacagttaaatttaatgaacagaacactacacgcaaaaattagatacacaatctttccaggcacacataaaacactagttgatcatgttctctaggacataaagcaagtttcaacaaacactaaataatcattatcacataagcaatattgtcttttaaatggaaaacaatgacaaaatgttaagctaaaaaacagctatatacaatgacttagtttctaaatactgtctccataaaagataacagaggtctatagagaaatgattaatggggtaggaagtacaagacaagcttgaaagtaaggaagtaaaaaaattttaaagtaagtaaaaagtgtgtttaagaatgatgacacatgtcaaaagacaggggagccaacttgaatgggcagccagtcactaaatctgagacaatttgggtattaaaataaataataacaatagggtatttttaaaataaagtaaaaatctatgtgtccaaagtaattaataaacaaataaatggagaaaaagctctaccttgatgtagaatataaactaataaatgtactaaaaatgatggagtttgaaaattaccattttgcattcatcatagcaatatctgattcagtcaagaattatcaatggatttgaaaaccagtggatgataatttaatgaggaacaggatatttacatagtctcaaagtatccccagcaaaatcattaattataaagaggaaaatgataactgtaaagtggattaatctagcaactattcaccacattaaccaagtaatcaaagttaactttactactaaagggtcaaaccagcatcatgtaccaccattatgatgccctgagaacaatacattacttctgtggtgcttttgctaatatgcgtactctgaataatggggaaatggcacacaaatttaaattaaaggacaatctatgaaataagtgtcctgtatttacccaagtgtcaattgtcgatgtgtgatattgtgatatatatatattggtttttgtccatggttcctggcttataactcccaaatctcttgttatttcctaagtgactaaagaaataagcatatctcttgttaaagtatttggtcttttgtctttggttcctgaagcagctttgaaacagcttcagagaaataaaagtgagagacagtttctctctctctctctctctctatatatatatatataaaaatatatatatatacatacatatatatatatatatatatatatatatacacacacaaacacacatatatatgtataatgttggggcactttaggcttcacaaaacagaatctctctctgactttctcctgccctccttttacctgctttttttttctcccaaaggcaagccatagaaactaaaaatatactctaatcttcacccagctttctggcttggagctggtcgtaaagaaattctctgacctacctagtttgactgtgggtcataagactcccatttcagaaagagtcctgccccatacccaggaggaaggaatgctgcacagagaaaccaagaagaatctgaacagacaagccttgctgggtttctccaccaagtctattggtattagatcataccctttagtccagtcacatttctacatggttgttcatgcttcattagtgcctatcagataaagtcttcataaaaagcacaagaggacaaagtacagctgaatttgtggaggatttcagaaaggtgacaaataactcatccacatgccaggagggtggcacaccctaactccacaggaatggaagctcctgtgctcagtagccttccagacctcactctatgtatctcttcatctggctgttaatgggtaaatgtaagtaagtgtttccctgagttctgtgtgttgttctagcaaattatttgagcctaaagagagaggttgcgggaaccctaacttgaagctggtcagttaaaagttccagaggcccagatttgaaactgatgtctaaagttgaggcagtctcgtgggactaagccctcaatctgtgggatctgatactttctgtagggagatagcttcagaattgaattggattggagaacacccagctggtgtccactgcagaattgtttacttgcctgtcggtgagaaaaaatcccaatacatttgttcacaagctttctgtgttggttgctgtggtacaagagccaaagaaaaactttttttccacacaatcagtgtcagaagtggggttgtgagaatataatgagagaaactaagtttgtttttctataaacataaaagacaaagaaaggtcaaggaattgttccatattaaaaactgaagagacatgacaagtaaatgtaatgcatcatcttggattagcactttgaccaaggaaagaaaataaccacaaaagacattattgggacaactgataacattggaatatggcgtagattatgatattgaaacaatgtcaaatttcttgattgtgacacatttactgaggatgtataagaggaaatcatcattctgaggaaatacacactgacatattaagaggtaaaggagaatgatatttgcaaactactgtcaaataggagaaggaggagaggaagagaaaaacagaatgataaggcaaacgtgataaaatgttaattggtgaatctgggtaaaggacattctgggagttctttgtaatattcctggtttttcaagtgtgaaattaaataaaaataaaaattttaaaaacacaaatataaaattcaataataactacatcaataaatatcaataaccacactttttctatgtatttaatgaaagaaaatgttttatattgccaaattctgttgggatgagcagccagtgtataatttttgtatcttgttataagaaggattaaaaaaaattaaagcaggtcaaaatggctggcaagcaggccatttcagcatcaggcaagtggctggatggtattcgaaaatggtattacaatactgyaggattcaataaactggggtwaatgagagatgatacaatatatgaggatgaagacataaaagaagccataagaaggcttcctgagaaccttyataatgacaggatgtgtcacattaagagtgcattggacctgaccatgaagcatcagatcttgcctaaagagcagtggaccaaatatgaagaggaaaatttctaccttgaactgtatgtgcaagaggttattcgggaaagaaaagaaagagaagaatgggcaaagaagtaatcatgtagttgaagtctgtggatgcagctgttatgaagatggttaaacttgaaacaaacaattttaagaattatttggtctgcagatgttttactttaaataaatgtctattgtaatggctggagttattccaaaccttatactgaataactactgaatccatttactgttaaatttttttccaaattttcaagatgtttttagtagtgtttaactacttcctggagctcagaggccactttatcagttttcctcactggttggatagcccatcagtttatgtaaggatgtaacttccatgagttatagccttatggaagctactaaataaaaaagggggtatgcaccccctagtttgccaggattgaaaaacagcctcttcactgctatccaaatagatttgattttgcatcctatcatttaaaaagaaattctgtatgcactccaacataggtatacttaagtaatatatatactcctgtgctaacatgtagactagaaaacaaaaagtagacattagaaaaatagaagtacaaaaacaaatcatacttttccccatatcccagtgacttttccactttggaaatgattgttataaagtttaagggttggatactcatcagttaaaagttttaagattataaggtaatttttaaaaatataaattagaatcattggccgggcgtggtggctcacgcctgtggtcccagcactttgggaggccgaggcaggcagatctcctgaggtcaggaatttgagatcagcctgaccaacatggtgaaaccccgtctctactagggatgcggaaaattggccgggcatggtggcgggcaccggtggtcccagctgtttgggaggctgcggcaggagaattgcttgaccccggggggcggaggctgcagtgggcctagattgcgccactgcacttcagcctgagcgacagtggctctgtctcaaaaaaaagaaaaaaatagaattattcaatgttgtcatcatttccacccctaaattctgaaatgctttctttggtggaggtgagagtgtggagccacagctagtagagaaggaacagtaggatatgcagcctccctggttttccaggacgagtcattgctgcgtgcggcaggaatgccttacctcaactaacaaaacagtgtgaaaaacaaatttgtgttacatttaaaatttgtaaagcaacgagaaatgtgtgtatcataaagagcatatttaaatttttgctaaaatatcaagtctcatattccctaggaaccaccccccatttttttttttttttttgctagtcagattatttttctaaacctatcttgaaatcatgtcaattttcttttgtctggttcaagacaactaaatcacttgataatggttttgctcaggtcacattgtgacaaggttttagtgtagccctacttcgcagaaggaggcagaaaagacggactgtctagaaccccctttaaaagcatttgtctattcagaaaattttcctgagtagatctctccaaagtctcttttaattgtgatttcaagatcacttttgcaggactctggtctatttgttcagacatctactgtgcacaattacaaggagactagaactgaggcatctcaaagagcactgtcaaggtgtgtagggagccgggtgggtggagggaggctgggctctgaccctagaaaccatgcttatgaatgctgttaatgtttaaagcaagcctaagggcactgctgaaggacaggggaacaaatagaatggaccaagattgaggtataacaagaactcccaggctatccacctgctcaaggtaaaaagtgtgatattacatagggcaacctctgattttgtgagagttcttcctaaagtcacagtgtatgcctattctatgtttccagattacttcattcttccaaacgagaccaagtgtgcaaaagttctttgaacactatatcaatgttttgtgttcattataaattatggttatcgtcctgcttgttatgaagactaagaaagtagatctagtatttggctcacataggtgaaaaggtgagaatttgttaatccatcagtgaagtcctttcatttgaaagagagggcctttctattatcaaaagctgtcctgtgtgaaaaatcaccatgaaagtacctgaaacacacaggcttgttgtcctgtagacagaatggtagagtgattcagagctaattctgggttagactgcacaggtctgaatctatttgctcactgtgtagtgctttaggaatacaatttaacctctccgtgcttcagtttctttggccctaagatagagctaatgatagaaaccaactttacacagttgtgaaaattaactgactacatgtcaaacagtctctggcacatagtatgcataatgtaaattatgtgatgagaagcgagaaaaaataacttgggaaaacactgaatatcatcaaagttgaatagctaaccagtagctaaagtccaaggtcccctctcttccttctatgtggcactcttgtttttggtccatctactccccttgggtgttacctccttgagtgaagtacctgctggagatgagaagagtggaactggatctgcatgacagctttgattaggatggagctaagacttggttatctccctgttttgtgttttggatgggtgacattttaaaactgccaacattaaaatcttgctaatttgctttgtacagtttaaaatgtttgatatcttttattgtttaaagtttgagattggttttgaatatatggttttcctacatcttgaagaaggatatgtttgtttgctctgaagtggtctatgttctgtttttctattttattatactttgcaaaaaacagatggctggcttatgttcactgttgtagtgcactacctagtatcactcagccttcctgttgtcaaggtgtaggaagcagtgtaagggatgttgggccttcagacccccaattgccaactctggtcctagttccagattgcatggacatatttgataacattcctgcactgagttatcacggtctgaatatttatgtgatgctctacgagtggtaccaaaatgttagtgatggaattttcactaatggcaccttttcctgtttttaaattctagaatcttaataaatccaaagtgtacattttggtaatgatttcatttagctatttactctaaggactgccttttaaagcattaactctgcaataactttaacttatgaaaagattcagcagtaagaataaaaactaggccaaagcacaaagtaataatccttcacaaataagatggagttataaaaatatgggcatcctgtgtgtagctttgaaaataaccgaagtacttggaactaaaaagttaggtgaacataaaaattgtcataaccaaatccttgacagcttgatggatgaaaagcagatgggtttacactgtatgggaggaggcatggattttaggaaggacagcatcagagagggatggttagaaagtgaacaagacacattgctctttggaaaacaaggaaagtcccttaattagaacaaggcatgaaattctgccactaggtggcgatgccctataactttacaacttagggtacatcacaccagcactatggaaggtttctccattctgcaccccaccaactccctcccctccttcatttttcaggatgacaacaccttagaggtttatggccatcaggagagtttactactaagctatatactgatctaatgaaacctaatatatgttgtgcaatgaattatgagttatttagtttcaggattttattaattcaatcagttatgaccatatttccttttatatgattgttcactctttatacataccagatgactgtataaagaacatctaataaagtctatagatgtaaaaaaaattaaaaaagaaaaataagataaagttaaactagaatgggaataatgtaatgatttcataatatattttttaaaaaaggaatcccatatgattagaaattgaaaaaaaacaaaccatgggtcaaaaaaatcataagagaaatttaaaaataataaatattgaatgataaaaatactatatataaaagtctgtgaaatatttctaaagtggtagaagaaaatttatagttctaaattcttattttacagaagaacattgaaaattaagatgctaaagattcaactcaataaattagaaaaagaacaataaaaggaaagtagaagaaagttcaatataaaaataaaagtcaaaatgattaaaataggaaccaaatatccaatgacgaggctcgatgaaagcaaaagcaagaaatacattagaaaattgattattgtaatttatcacatggtcacactgtgatattaatggtgaagaaaggatatgaaagtggcagtacatatagacgggaaaaaacttcataatatttgtaataaaacctctcagcaaactaggaacattaagaaagttccttaacttgagaaagacaatctactaaaaaaggtgaaacttttgtagaatttaggaacaaaataaggaaatcctctaccaatgctgttgttcctctttgtactgaagatcctagctagcacagtaatataaggtaaagaaatattgtaaagaaactgtcattattcaaaatataattaattaacagataatccaagaaaatctatacattattagaataaacagaatttaagaaggctccagcatataaaataaatatacaaaaatatcaatcatgttcccatttactagaaacaattagaaaatgtagttaaaaagatgatatatttcacagtaataatagaaactataagtacaagtgaatctaacaaaacatttcttcagattacactattattatgaatatgttttcatataatgtagaatatagtttcaattttatcatttgctgctatctttttgagttttgtttggctactttttaatgtgtcaaaaccaactcttttttttctcttcctcctcttaataatttttggtaaagagattaccttaaaaagcacaacttccaggttcaggacaccagaaaaagcagggtagcattgtaaataatcttcattgttttcaccaggtgaactattatatgaatgcaccagggaaatggagtcatactgcaatcactcaaagactgaaaaatagtaaaaaatattgtggcatcattttttctgtttttgtccatctctttgtcccttggtctcctcaaatcattatccttcccatacctctatttcaatgatttattcctataaaacagttgtatacatagtattagaagggatgtattatatagaagtttagagcataaactctggaatcaggtgttctgggttcaaagctcagctcagctacttcttgctgtgtaacttgtggcaagtcatacaacttcccttggcctatacaaacttctctagtagagttgtgattaaataaattataacatgcaaagccctttagaaaattggcacataaatcttcagtaaatattggctattattacaattatcagtgatttgaatcacttggaggggaaattatgtagctactgcacttattgttttgttcttttgttttcttttctttttcctttttattttttaaaattatttatttatttattttttacaccgagtcccggtctgtcgcccaggctggagtgcagtggcatgatctcggctcactgcaatctctgcctcctggattcaagcgattctcctaattcagcgtcccgagtagctgggattataggcacacaacaccatgaccggctattttttttttttttttttttacttttagtagagatggggtttcgccatattggccaggctggtctcgaactcctgaccttaggtgatctgcccacctcagcggcacaaagtgctgggattacaggcgtgagccactgcgcccggctgctcttttgttttctatctgagcaattttctccctactccctgcaaccttccactccactacccctttgaatagaggtaaacatgtgagaagtaaaactgtatggaatgacagggagatgctttcaagtaaaatagatttctatttttttttttctatgcattaccaccaaacccaatgtctaaaacttttttggtcgccaaagttgtcccatcattcattgatttatttattgaaatatctgtttcactcctattatgtactaggcactatgccttggccatccatcccctacagctctcagaataattcctacccattgcaagggcttcataaaggtttactgcacgaatgaagaaaagat

SEQ ID NO: 94236 - DNA, 115026 bp, Homo sapiens
gggcatgctcttttcagactctgcccttcccacacactgtctgatctttctagaatgaattctcccttctctgctttactaacatctccttgtctttcaggactcaactcaaaaacatgtttttcagaaactgctctctgacctttttatcatattgattagaaattaactcttcttgcttatctttccatcagaccatgagcttctccaggcaggctctatgtgtttgtttttacttaccccagatgccctagtacataccttggtacgcagcaggcattttcattaaataaagatacataatttcattggagaatttattgtaatttttcagctaagcatcaaacgtatgaaatgaatcttagctgtaaaacaacacaatgaacaacaaactacaaatgaaaagaaactcaaaataataatgggatgcaaagcagaaaatatttttaaaaggatggaaaacaaaataattaaaatcaaccatggtatttgtatagagagcttttcttgatgttttagaaagttgatgaaatattttaagatactcaaaaatatacaacttggaaaaccagtaacagtctctgcacacagttctagatagtttttgatgatacacgctaacttactcatatggagaattgaatctttaaaaatattaagccagcaaattttagaaattagaactgagcactcttctgatcaaggatcctttcatgcttcaggaaacattatgaggagaaaaatgccaaacctatcctacctcctttgaagccaactttatattctcctgtacacaagctataaaatcaagtcctcctcttgtgagtgccactgtggaagcagagcagaaaaatgttctaactggcatagttgcaaccatcttcctttaagrgtgactaaggcccacatagctagttaggtagccttggaactggggcaaaaatcacctgtgttgcatttacactacagccagtgttggattaggcagtgaactctgtcctctttcagagtagcctggtcttagattatgagacagggactcatgagatttggcactgtaataaatatatgttaattttcaaaaaatatgaaaaatttaaattctgtgtttaaagttcttaagtgaagaaaaatgataatcagctattcactttttctttcttaaacctatacaaatttttattaagaaaattttcaaacactgaaaagtaaataatatgtaactccctctatctctaccattgagatttattaactgctaacatttttgccatatttccttaattttctaactttttaaatttattttgtattttttatttttttgagacagagtttcgctcttgtcacccaggttggagtgcaatggcatgatctcggctcactgcaacctctgcctcctgggttcaagcgattttcctgccttagcctcttgagtagctgggattacaggaatgcgccactaggcccggctaatttttgtatttttagtagagacagggtttcaccatgttggccaggctagtctcgaactcctgaccttaggtgatccacccacctgtgcctcccaaagtgctggattataggtgtgagccacagcacccggcccaatttaatatttttagagatggggtcttgttttgttacccaggctggagagcagtggcaggatcaaagctcactgccaccttgaattcctggattcaagctgttttcacacctcagcctcccaagtagtggggactacagtcatgtgccaccaggcctggctaattttcttactctttgtagagacagggtcttgccatcttgctcaggctggtctcgaactcctgggctcaagcaattatcccgcctcggctttccaaactgctgggattataggcataagccactgtatctggcttgcttcattgttttttgcttaattaaatattttaaagtggtttacagatttcatgacagttcatccctaaatacgtgagtatgcgtttctaaaaatttaggacagtaacttcttaataataatcagtagttaatttttttcttcttaagagactatatgtgttctggctgggcacggcggctcacgcctgtaatcctagcactttgggaggccaagtcaggtggatcacctgaggtcaggagtttgggaccaacctgatcaatatggtgaaaccccgtctctactaaaaatacaaaaatttcacaaggtcaagagtttgagactagtctgatcaacatggtgaaaccccatctctactaaaaatacaaaaattagccaggtttggtagcatgtgcctgtaatcctagctactcaggaggctgaggcaggagaatcgcttgaactcgggagacaaaggttgcagtgagccagggtcacaccactgtgctccagcctgggcaacagagcgagactctctaaaaaaaaaaaaaaaaaaattagctgggtgtggtggcgtgcacctgtagtcccagctactcaggaggctgagtcaggagaatcgcttgaacctgggaggcagaggttgcagtgagctgagatggcgccactgcactacagcctgggcgacagagtgtgactccatctcaaaaaaaaaacctaaataataataaaaaaagactatgtgctgtatgtgttcagttattgtatcagtaagataaaaaaactaacttgtttttggacaaacagaaaagcacaggagacaaacacagaactcataacaaacttaccagctagaatcaagataaatacctacgtgtctgtaaatggcgggtgtcactccttgccaaagctttagaaagccttcctcttcaatgatccctagrgctgtgcgcaccattcccctatagggggcagattctcttgcaccgtctcccaaccgagcaagagctgcttctccttgcatttggagtcgagtttttgtgagatccaggggaaaggttgctaacaaaaacacaaatgcagggaaaaacccacaacattcagagaaacaaacaaaaatctaaaatcataggagtaatattttcccaagactggttgttctcaaattttagaatatatcagaatcagctagggagattttaaaaattagaaatttcctagccccgtgcccatggattctaattcagtaggttgaagagggtttagaaacttgattctcacacagtcccaaatttaagaatcactacgcaagagcatcctggatcactagcaaaaaaaaaaaaaaaaaaaaaaaaaaaaaacaaacattaacaataaaaattaaaatgacaagccttgggttctttctattcagaaatttaactttaatatctgttagtcattaatttttgcttttcaatgggaaataatttaaagtaccatattgtgtgctatcctcttgactgcagccatgattatttgagatctaatgtaacattagaatactgcactatatattcttatgtactataacaaatgctagatgaagctgaactctataatttcgtgggtgatgttcacatgcagatgaatgactgacataatgtttgagatacagaagatgtaatggagtttataatgttgtcttttatatgcaagggtcataagctcaatatcctttcaattaaagcatatatggaattatttttccagcactaaattatatgcatcgcctactcatggcctccttacaagtactaactgtattttggaaaaattttttggttttaagttttaaattagatacagaccttttaccttaatacagttaagctaaacggcctacataaggaagatagagctcataaccttatacagaaaacgtcctgaataattaaaataataacattcagacaagttcatgaacattacttacattatataagacttttcaatgaccaccacctgacacaaaaccttagtataccttttccaagagaaaacaatgtggggaagggaagtgaatattaaatcttaccactggtttttggaaaagttagtatcttgctgacagtttccctagaacagaagtagcttgcatagacttcaagcaatattttattgacatatgaaacctgaaaaatcttaatagatttctccatattacacagattatgtctttcaaaataagttttgttttctcgctggtttgttaaatgatgcttcaggttcctgaagtggtttgtacttaaaaccatcccacattttgattcccatccattctccacacacaattctctccatgaatttttaacgaggaatagtcctgtataaaagccattgagtcagagggggacacatcaattaaaaataaaacctggaaatatcattcagcaatctgcttttagatctttttaagctgatgaattttatttcagtaaaaacaatgaaaagtaaaaattctccatcattttcgaaaggagagacattaaaaaatagaggggctaaaaggcaaaaatggaagagcacgaaacaactgatcatggctggctatgctagaattaaaaaataaactcttaaaataggaccaactaacatttacaaatgataacgcatcagaactgttctttttatttttttgtaacaggcaagaaaatgtaagggtaatcttaaaatacacagttaaggcttcacaggaaacacatgagtatactactcacaaaatccttggaataaacgctacttgctcattcaagggcatcatcattccactctagatggcctcttaaagttttttcttactcatgtaggcagatgtaactgctcttctatgcttttatgacacctaataatatcttcattataacaagtagcacattataattgtctttctctgtctccccagcagcctgtaagaaggtcagaactgggtcttttcaaatatatatccacagtccctggtattgtaggaattataaaaatgtcgcaactaatgggtgtcctgccttgggtttagcaatcatatattattgacttctcagaatcctgcaaggtaaacagtatagatgaattacactcaaagaggtcaagtagtcgatgctctgtgagtggcaggttaataacggaagtcccacaaggtaggtccacaacttggacccacaagataatgacagtgtggctgtgtaagactataaaccacagagatgatctcagtaaggatggaaaacagattacgtttttaaaaaggtcatcctcatgaaaaggaaaatgattcctacagaggaatgacagctcgcgaagcttcttaaagtacaacattcaagcaccacagcacatgcctaagggaagcattagaagagattagaaggaaaaggccgtggagacctcaatccctcctcctcccaccgcgggcctggcctccaccgccacctctgccaggcgggcatggaaggggcgacctctccgatgcgcactgccgggcgcgaagccgcccgcgcwccctcccccagcgcggcgcgtgccactggcccgggaggcccaggcgtgggcagccgggtacctagctcggccacggtagccgcgcagccggacagtaggaatttgctcgctcggggccatctctgggtcagcggcaaaagcctctcctcctcctccgggacggacattcagcagtagcgcaagacgataacgcactccttctcgccgctgcgctgcaccgcgccgcggcggccgcttccctgccagggcggccccttttcaaccggcgagtggccgggtgaggaccatttccctcgttcggctcggccgggtggacccgcaaccttcctagcagtcccagctggagtggtccagctgccccttacaccccagaatagaaaaacacagcggagcccaggaggttactgggcaatgtagtccgccgggctccgctacgtctctgattggccggccgcgggtccctctgcggctccgcccccggcctccatggcaacgcggctggttctcgcccgtcagtcctagcccggccctgcccctccttgcattttttccgcgctggctgagattcaaagagaagtggaggtgggagggagcgacaatggaaaaatcacctgaaaactgggacagaggaaggaagctacagttacgaaggagagctgsaaaagttgcagcagaaaggttgggagtcccgacaggttccgtagcccacagaaaagaagcaagggacggcaggactgtttcacacttttctgcttctggaaggtgctggacaaaaacatggaactaatttccccaacagtgattataatcctgggttgccttgctstgttcttactccttcagcsgaagaatttgcgtagacccccgtgcatcaagggctggattccttggattggagttggatttgagtttgggaaagcccctctagaatttatagagaaagcaagaatcaaggtatgtgrtcgtggcagacggggtctccagaggagacaatgctttcttttttaaactttctttcattgactcttaagtgcagggctagaacacggggaacatacctgcttgcctcaactaaaggatctagtcatttctgaattcctctactaacaattaacaacaatatcctgtgcaaaattttgcgaaagaaatgaaatacaattgcagcgtgcatcgacatttttggaagtagagattaacttttcgtatttttacttcatcgaagttaagttccaaatgtgtatgtgttaagtaaatgttttcagtaattgggaaagataaagtgtaatccaatttaagtttgtgaaaatgagtaattcgtatccaaattggagttaacaccaaagtattgtacaaattgcttgcacagttggtccgtacacaataaacaggctctgtatttttagctgacgttgttatttgatgatgatgtactccattttcactacggcctgaagagactagtaatcctccttgtagtagatgtttttgtcttgaaagtatcttttaaatgtctgagcactttaaggaacagacctttattaatgtcttttaagttttattcaatttccagtcacaaatattttatggtatttgattgtctaataaatttgtatgatattataattattcttatgaattataatactttctgtggtgacccattttccatctggttagcccaatttgtagaatgaatttatacgtagtagcattattttaccactgatcatttgccttcaaaatctctgagattccaatttagtaaaaaacatatagaaaattaaagagaactaagatgaaaataaaaataacccagaatatcacaccagctgtactgtaaaaatttagtgtatttatattattttggtcattttcctatgtatttacaactatttaatgaacaacaatggaataatagtataatactcttttatgtgcttttgattttaacatataatgtgaatgactttcctgtaccatgaaatactttgaatcttccttttatggctatattttgtcataggaggatacaatagtttacttaaatctcaatagttgggtttataggttgctgccaaacttttttctttcagccagtgcttcagtgaacattcttgcgtgtttgtgtgcatgtattgattgtgtggttgtacattttgcaattatctgattgtttactcagaataaattcctaggagtagaattgctgagtcaaaggacatgcacacttaaattgtttatatgaatgtgttacttttggaaaaagaagtatgaatatgcaatttttattttccattgactgtatgcaattgcctaacttctcaaatcctgggccatactgaataccataattctttgcaatttttgctagtctgatagatgaaacattatatctcctaaagaaatactcctttgtctcccacagccttccttatgcatatgatcttgataatttttaaggaactgtttttttacaagcttgtgtcagaaggctaaatatttgtgaggtctctattgctttcctgactaaacaaaacaagttattgctggactctgtgtctcacacctgtaatcccaacactttgggaggcaggggtgggaggattgcttgaggccaggaatttaagaccagcccgggagatatagcaagacctcatttctacaaaaactaaatagaaaaataaaaaatttaatctggtccagtggcacatgcctgtagtcccagctcctcgagaggctgaggcgggaggattgcttgagctcaggagttccagattccggtaagctatgattgagccactgcactcsagcctgggcaacagagcgagaccttgtctcttaaaaaaaaaaaaaaaaaaaaaaaaaaaaaaaaaaagaatatgactgcattatttgatgttttactactaaaagcttttaaggttcactcttgtcttttcttgtacccttaatctgggcagtatgataaaaaaaaaagccagagtgctcccacctttggtgccaggggagattcaaatcacacaaacctcaaccttcatgcaggaaggctcacaccagcctaccccctaaccacaatgaaaccctaagacctgtctcttttcactgttttctcaagtcattttcagatcagcttgagaggactgcccttctttccccagagaagtctcattgtgtatgaaataaacctcttcataccctctcaaggtgtgtatgtgtgtatgtgtgtgtgtgtgtgtgtgtgtgtgtgtaaatgtagtaattgtcttaacatccaaaccagatcttgggtgggggtccattctgagttttcgcagtggctgcaacaggtactcagtagacttgatgcgaaattgcatctaaatggcacctgcataagacactacttatggcgtattgaaccttcaagaaaaaacttctaaaactccatcattagctaacactctcagcttctcatgctcctctagaagactgagaagagacaactttggtgaccacaaaaacatcttcccattatttttatttaatctttgaatagatcatgcatttatacggttcaaaaaattgtaaatataaaaactacggggaaagtcccttcaacctctttttcccttccacccagttctcactcctcactcccaaccttggcaactgtaattcatttcttatatattgtttcatagtttctttaactgtatacaagcaaatagaattatagatttttattttccgccttataagcaaaatgtgtcatattattcacactgttcctatgtcagtagggatttactctttacatattagtaccatatagaactcctaattctttgaagatgcatggatatggctacatttatttaataagtttcctcatcgatagacatatggtagtcagatttctaagataacctgcaatgatcttgcaacgattcccttgtgtaatcacttccttttgagtgtcaacaaaacctagtgactcacctctaatgaacacaatatggcacaagtgatctgatgttacttctgtgattaggctttcatcttgatagcagactcaattgccttcctagtttgcactctttgatgatgaaagctgtcattatagagaggcctacaaggcaaaaaatagagggaggccctggccaaccccagtaaaaatcaaaagtcttcaatccagtagcctgtgaaaaactaaattctgccaccaaccgtgtcagctgggtagtgaatacgactacctgagttgagccttgagatggctagaacccaatctttagttacgaaattctgttacaacagaaaaacccatattgcaaacctgatactttgtactttataattgagacagaagattttgtttatgcttcaaactgcctggttatatcagtcttttgtttattagaatttaccattttttaagcatgagacattgataacatttctggcactctgagagagttattttaaacatgtaatagtatagacaatctgcagctatctacaagtatctatttgttgacacaatggaaacattatttgtttttttttttaacttttaccaactgttttaatatacatcaaacaatctgcattaatccttttagtctttttgacctaccctctctgcatcttaatcattttcttgttgtgccaatactgtttgcataagagtaggtttataatttttttttattattatactttaagttctagggtacatgtgcacaacatgctggtttgttacatatgtatacatgtgccatgttggtgtgctgaacccagtaactcatcatttatattaggtatatctcctaatgctatccctcccccctcccccctccccccacccaacaacaggccccggtgtgtgatgttccccttcctgtgtccaagtgttctcattgttcaattcccgcctatgagtgagaacatgtggtgtttgattttttgtccttgtgatagtttgctgagaatgatggtttccagcttcatccacgtccttacaaaggacatgaactcatccttttttatggctgcatagtattccatggtgtatatgtaccacattttcttaatccagtctatcattgatggacatttgggttagttccaagtctttgctattgtgaacagtgccacagtaaacatacgtgtgcatgtgtctttatagcagcatgatttataatcctttgggtatatacccagtaatgggatggctgggtcaaatggtatttctagttctagatccttgaggaatcaccacactgtcttccacaatggttgaactagtttacagtcccaccaacagtgtaaaagtgttcctatttctccacatgctctccagcacctgttgtttcctgactttataatgatcgccattctaactggtgtgagatggtatctcattgtggttttgatttgcatttatttgatggccagtgatacagaatgggaaaaaatttttgcaatctattcatctgacaatgggctaatatccagaatctacaaagaactcaaacaaatttacaagaaaaaaacaaccccatcaaaaagtgggcaaagtatatgaacagatacttctcaaaagaagacatttattcaaccaacagacagatgaaaaaatgctcatcatcactggaaacattacttgaaaacacagtgtcccaaagtgtactaggctgaagttcgatattttgcaaaaatattcaataaatagtttaagtagattgttggaaaaatatttgctcaataaagcatcattatttttcaggttctaatgagggaaatggtgtctacctcccaccaacaggtgtagaatgtgaaattctgaaaatgtgggcataggatctaaatgtcaagcagcccccaaaaagacaaagttccctacattaaaataggtaaattagacaacttctgcagtttgtctacttaaacagctcttgggaagggcacctcctttaagccactctaagcgatatttgaagtcttacctgtagtcatctatgttgagttaaaatctactttctcttatattattaaagctgcaccaactttgttttggttagtgtttggatgatacatatttttctatccctttcaatttttctgagtctttgtattttaacccagtctcttgaaaaataaaagatagattgaaccaaatgaaaataaaaatacaacatgtcataatttctatcactatgtgcttatattagaaaagaaaaacctgaaatcgataaactttcaagaatcatctccttttataaacagagtaaaataagcccaaataaagcagaaggaaggaaatagtaaggaacagaaatcaatgaagttgaaaattaaaaaaaaaaataaggaaaatcaatgaaagaaagaactggttttttgagaagaccaataacattgccagacttcatgcaagactgatagagaaaacaccaatgaccgatgtttgaatgaaacagggaatatcactgcagacatcaaaagggatgataagaaaatactatgaataactctacaaacataaatttaacaagttatataaaatggatcaattcttagaaaaacgtattctaacaaaactatccaatatacaatacataattttaatagccctacactattaaggaaattgaatttgtattttgataacctcccaaaaagaattctctatgcccagattgtatcattggaaaactataccaaatgtttaaaaaagaattaactatgagttccatttcttccagaaagtagaagacaaaggaacatttcccagtctattttatgaagctggtattaccttgatctcaaaccacagatagtacggaaaaaaactacagacaagtattacttatgaatatattaatagatgcagaaataacaaaatatcagcaaataaaatttatcagtatatgaaaagaattaccgagtgaagtctgtcaatccacataggctgctgtattaacaagctaaagaagaaaaagcacataattgatacagaaaaagcatttgacaaaattcaatatccattcctgatatccattcatgatatcaggattcatgatagagggaaatttcctaactcaataaaggacatctacaaaaatcctgcagttaacaggacacttaaatgatgaaagactaaatacttcccccatgtgattgggaacaaagcaaagatctctgttgtcacaactcttattcagcatagtgctggaaattttagcctgtgcaataaagtaagaaaagaaaagaaaatatatatggattcgaaaataagaaataaaactgtcttaatttgcagattacatgattgtctatgtagaaaatcccaaggagtctacaaaaacctctggaataaatgcaaggtatacataaagatatcaattgtttggttacatactaacaatgaacatgtggaaaccataattaaaaatacattaccatttaaaataactcaagaaatatttaggtataaatgtaacaaaatgtttagaacttgtatgctaaaatccacaaaacattgatgaaaaaaatcaaaggtcttaagggagaaacatactgtgttcctgattggaaaagtcaacatattaaagatgtcagtttcctccaaactgatatccaggtttgatgcaaatgctattcccagcaagatttgttgtagatatagacaaggttattctaaaatttatatggaaagacaaagaaactaaaatacataaaacaattttgaaaaagtagaatagaatgagaggaatcattccactcaatttcaaggcctattattaatcaagatgatttagtactggcagaaggatagacacaaagattagtggaacaaaatagagtatctagagatagagccacacaaacatgccaagtgatttttggcaaaggtgcaaaaacaactcaatgaaataaagatggcctttttaaacaaatggtgatggagcaatttgatagcgtaagccaaaacaaacaaaacaacaacaaagaaccacccccaacacacacraaacatgaatttctacctaagtcctatatctgatataaaattaactcaaaatagataacagacttaaatgtaaaacataaagatataaaacctgtagaaagaaatatagaagaatatcttcctaatttgggatagaaaatagctcttagacttgacaccaaaaggacagttcataaaaggaaaaactgataaattgaacctcatcaaaattaaaagcatttgctctgtaaaagagctcattaaaaagatttaaagaaaagctacacactgggataaaatatttgcaaaccacatatccaacaaaggactagtatctagaatatataaagaactgtcaacactcaacaatataatacaaaatccagttagaaaatgggcagaggacatacacaagatgtatcaatgaagagaatattcagatgtcaaattggtacacgaaaagatgttcaacatcaatagtcattagagatatgcaaattaaaatcatgagatactactacacatctatcagaacggcaaagataaaaattgcaacaacaccaaatattggtgaggatacagagaaactggattacttatacatatggtggaaatataaaatggtacagccactccagaaaacactttctcagtttcttaaacatccaaacacgcagccaaccatatgacctggcaattgcacttctaggaatttatcacagagaaacttaatgtttacataaaaacccagatatggatgtttatggaagcactatttgcgatagccctaaactgaaaagaatctcactgtctttcaaccttattcatttttattgttttgatttttagagacagtcttgctgtgttgccctgcccagagtgcagtggtgcaaatcatagctcactgcaacctcaaaaactcctgggctcaagtgatactcctgcctcagacccccaaagcagtaggattataggcatgtctagcccagccttcataatgtttaaataaactgtcgtacattcatacagtggaatactactcagaaatataaaggaatgaatgattgatacacacaatttggatgaacattcagagaattacactgaatgaaaagccagtccccaaaaattgtatactaaatgcttctgtttatatgacatagtgaaattcaaagttatagaagtggagaacagattagtggttgccaaggattaatgagaaggtaggagtgagagaaacagtgggggctggctataaaagggcatcatttaagatctttgtggtgatggaaacattctgtatcttgactgtatcaatgtcaataacttggttgtgatrctgtactatagttttgcaagatgttaatactgggaaaacagtaatggatacgtaggctctttctgtaacatttcttacaaccgcatgataatctacaattatctctaaataaaaagtttagttaaaaaatatacaagcaccacttctacaacataccgtgtgtgcctgcctgtacttcgtaacaccgaggctgctgacattgcatacaaaaaaagaacaaaaggaaagcaagtaaaacaaacacaacaacaaaaccctgttgcataatttctaacactgtgcatgaccatcttttactccgcagttatattgcagttactttaaatgcctcacatcaacaattatctcaactgctgattcaatgtatttgaatgtggttagtctacacttgtggccaggtgcttatagatgttacaaaaagctacctactaatgggaagttaagaattctcatttgaacaaaactttaacaatgaaaatgagtcatcttctaactactggttaacaaacaattacagataggaatgttagaaagcagtgtagatgtctggatcactaatgcacaaaaatgggacttcattttctggtggcttaatgatttttgggcctgcaagttgcctagtagcacccaacactgtgttgcaggagtaatcatgtgtcatctcttgggaggtatagaaatgactaatactgaagtagtgatgagcataaattatgccttgagatatgtataatgctgtaatggaatatgaaagtatggtgatttcttttgatgatagagtcatggagaagactgaggtttgttgcccacattcataattgaagaaactgctaaattatacttagacgccaataaaaatgatgacttttttttcccaacaaggtcatagacccctgctatcaaaccctgtgctacagtatgttcaaaggttgctaagagtgatctgataaagaggggaaaattaatgatgtaggagagagagagtcataaatgtagaagagagaaggcaagagtgtaggatccataacacaaatggagaagtgttgacatttcacaagggcaggaacctccatccgtgttaagaggagggaacgcatggagaatgggtgcaaatgtatataccttgcaggatttagtagcgagaaactgagaccgctacttgattgctccatttttctagtgagttacaaggcagggacactatgtcagaatggagaggttgggcaggttgtacaggtgaaataatcattttgaaaactaggaaagtgaacagattagaaaagtgtataggattgcaagacattgttgaataaccatggatttcccataaaccagttggcaattttgaacctttttgttgaacaatattcagctataggttgcttataagtctaccaatatcttgaaaacaatgtttaaatgtcacaatgttgatataatttctaattatttataattattattttctacttatttcatagtacaagaaaagaagctataaataggcaataaaatgatcaaagggaatattacatattaggacagaacaaattaaaatgtatataattcagatctggctgaaacaatcaaaatttataactaattgccaaatataatcataataatttttcttttgactataacttcagcattaggattcttgaggwgaatggtcttaaacatggcttaggaatgcttactaatataatctatgtttgttttatttcagtatggaccaatatttacagtctttgctatgggaaaccgaatgacctttgttactgaagaagaaggaattaatgtgtttctaaaatccaaaaaagtagattttgaactagcagtgcaaaatatcgtttatcrtacaggtaaagaatattttcagatagtccattcgaaatccaacattggaatccaggagtagttttaggtaaaaattacatcctcattcctctatcaagaatgatgagggtccattattttattcttgaggtatgsgtagaagaggaaagagttatgggtagaatagtttggccattgaaatgcaaatgaatggcagcytaatacatttagatttgaattagacacgtgaaagtgataaggttacctcattgatgttttctttagagaatatttggaatctgtatcatgttacagcttccaagatgtcactaactctgttccactgctgtgtatacagtgttctacagggtacagctcttggactggttacatgttactcagtccctgaaactagaattccatggcttagtaaatcctttacagtggcatttcctgacaaattttatagggctgttatggtcaatgggagcttgacttgccctttcacaaatcctccatcttcagagactaccagattgtacagtcagcatgcttccagtatggctgtctgccttcatttcttcctaggctgcaattgtgtgtactggggccatgtgtcctccctggaacgcagagctggttcaatttgtgtctggttcttttttgtgctttcacaatgtttttgcttgcttctattctctgtggcttctttctctctgtttcccttttttcttctttggttccttttcatgtaaccttttgtgcatttcttgccattaagacaagaaagtttgttttaaaagctaccagtaatcaatagaattatatatattttttcttcttgtatgcatgatcatcacaacctgttggtgaaattatttgattatttagtgcttcttgatacttggactatggaattttagatcaaataatataaatattttgaaggcctttgatctgtagagtcgcgtatcccttcagaaaaatttactaagttacctatcagaggtgtatggaaatgattgagtttttttcacctgagcctcctctggggactttcatgtttaaatatttcattgaacagatgaaatatattaatatttattcttgagtcagcttcccatccctcccatatagtagatgtatgctactatacatasagaagatgtatagtagcatactatacataccagcatagtatatgtatagtagcatagtatacatactatactggtatggtaacatagagaagatgtatgctcaggaaatctaaaaactgtttttcattaacttacacaaaatgtatcttacacgtaataggatgacgaaatacaaaattaaaacttattctttgaaaaagttacttcaataaaatgacaacaatggacacaggggactactagagggaggggggtgggcggcagggggcaaaggttgaaaaactaactattgagtactgtgctcattacctgagtgatgggattaatcatgccccaaacctcagcataacacaatatacttgtataacaaacctgcacatgtaccctttgaatctaaaataaaattcaaaatttttttaaaacagaaaaagttacttcaaggtcaataaaacaagataaaataaaaatataaagaaatgagtaaacaataaaccacaatttctaattaggaatgtgtgttatagaaggagcacgaatactaacataaagaaaatagtgggctcaaagctattcatggggttaggaaaggcctcctggtggaagtagtgttcaagaagacacttgaaggacaaatagaaatttgcaggagaagtttgaggctcataggtataagtgtgtgggattgggtgggagtagatatgggtataataaaggagagaacattctgagcagacagaacagcctctgaaatgctgggatatgtaaaatatgtttttaatgtatctggactgtagattttgagggagaagggctgaaaataccagctctcttaatcacccatttatagattatcccttaaagtgaatagatttccatyatctcacagaatacgttgaatcttttttatttgtttgttttgagataaagtctctctctgtcacccaggctggagtgcagtggtgtgatgttggctcactgcgactccaactcctgggttcaagcgattcttctgcctcagcctccccagtagctgggattacaggtgcccgccacagccrgctaattttcctatttttagtagagacagggtttcaccatgttggtcaggctggtctggaacttctgacctcaagtgatccacctgccttgttctcccaaagttctgggattacagttgtgagccaccacactcagtcgagaataggttgaatctttatctacttttatttatgggaggtgaccttatgtactgagaggactttggctgtagtccctgctgaccaaataatagtagatatatattgactgtgtgtttcaaggagttgttgcttattttgaaaatagttttctttgttcatagcatcaattccaaagaatgtctttttagcactgcatgaaaaactctatattatgttgaaagggaaaatggggactgtcaatctccatcagtttactgggcaactgactgaagaattacatgaacaactggagaatttaggcactcatgggacaatggacctgaacaacttagtaaggtaaatagacgcattagtatgatttagtcttgctttttgttttaaataaaaaaattgaaacctatagattggacttcaaacattgtcaggttgattaatgaaatctacctaactaggctattaagagattattttaatcttttaaattwttttttttgagatrgagtctcgctctgtcaccaatcttttaaattctaattcagtttagcatttctattttatggtgagcaaacaagccaatacagtcattgtaatacatttgcagtaatttatccttagtcattccatacatttgtgtataaactacacggattttcttcttataattttcatacttcctgtagaattttgataaaacattcagtgcaatttgctattattagaatgagaggacgttgagaggataggggagagaatggaatcataaagtggtgaaaaaagtccaggagatgtttgtgttacttaacaagtggctcaggcaaagtcagtgtgggcctcaggactgagccccagggtcctctattaagggagatcccaagagacagggaagagcagcagacggagtcagccccattctgaagctttctggaaaagttaaagtctgggcatgggagacatgagaaaatttcccacatgcataaagagatttcgtaagttgaagttacctgagtcactttgccatctcagcaggaatcctggaatgcccaaggcaagattgagcagttcagactcagaatgacagtgaacattttgttagaggtccagtagtagggggtggaggggggacacaaaaacaaccaaatttaaaaatgtgctgaagcatacccaatatctataacaaaatgaagatattgaaatgaacaaaatattcttggatatttttaaaactttgggtggaggarattatgaagggatggtaaataaaaattaaataaacagtattaagtgttttaaggcatgttaacaatattttatattctttatcttaagtatgctacagtaatcactttattctcttaatggtaaaacttattgatgatatgtactatatttcaatgggcaatagtttgaatttatgggatcctgtgagaaattagggaatttggtgactaatattgccctgaatctttgttgttgttgttgttgttattgttgttgttgctgtctaaaggcatggactatatcttagctactattatttgctaaataaattattgttgaattgtattagatcagtttatttattatctcatatttgtcagagtctaataagcttgtttagaaagcatttaaatatcttcagataaatcaaaccacagtttcagttccccctgtattatcttgaccacagtaagcaaatatcaaaacttcttaagagtgactttttcccaagagaatctgtcacctattatctgctccccatatattgctatgaaataatgccttgcttkgtatcctttgcctttcttctttggtcttcgggtctgactttttgtgtgtttctgtctttgtagacatctcctttatccagtcacagtgaatatgctctttaataaaagtttgttttccacaaacaagaaaaaaatcaaggagttccatcagtattttcaagtttatgatgaagatkttgagtatgggtcccagttgccagagtgtcttctaaggtaacagttgtttcctataattaattcattgaccaagcttatctcagcaattcaacacctctcatttttctgttctaagtagatgtaacagcagtttaagtgggagagaagccgtttcttatgacctgtttgtttttggtgtctgtatgtgaattgaaggaggaccaaggaagagagatgcttttcttattgtgatgaacaaaaacaaaagagagaaagagatcgatgggattaagaatttattttgaggtcttttatcccatgtacagctttttattattgcactcattgctacagttaagattcctgctaaatcgtcaacctgagcagtctcagaatcagacactgtgctcctcattctctctgaggcaaacatgggcgtggttaaatgcatttctcacagttggttcagacaaatgtttgtaaaatgaggcacatgcaaagtaactgcatgattttgaaatttcttggcagtggctctatgtctttctccatatgggttgctataacaaagtatcatagactgggaggcttataaacaacagaaatttatttctcatcgccctggaggctggaggcctgagatgagggtgccagcatggtcacgttctggtgagggctatttctcattgccctggaggctgggggtctgaaatgagcgggccagcatggtcatgttctggtgagggctccttccgggttgcagactcccaatttttcactgcattctcatgtggtaaaaggggcagacagactccctcagaccctgttcataaggttagtactccttttcatgagggctgtagcctcagaacatagctaccatccaaagacccccacctcctaatgacatcaccttgggggttaggatttcaacatataaagatttgggagagacacagacattcagaccatagcctacgtagaccattcatctacaatggtgactgttcagacaagatttagaagatgagagccagtttgtttttcccggcttaagtcagcgattggttctgtgcattgggttttcatcctcctgcaacttacagcagccacagtaaaggcagaccaagcaagtgtgggttctgccttcttattcagtgccaatccagtaggactccaaagttttatttacaaaagacactaaaatgtagttgctctgcctccccagctgtctttgtggactaatcattccgaaggtagaccttccatgaaattatacctgaaaatgaagaataaatttggagaactaattttaattccacagacatcccttttttatgctgtgacctgttattcctaaagtgctttccaattaatttctatatatattttttctcatgtasaaactggtcaaaatccaaaaagtggttcctggaactgtttgagaaaaacattccagatataaaagcatgtaaatctgcaaaagataattccatggtaagyatttcttacctttcttttgctaatgtaaagatagtaataaattattgttgttaaaatatattttgctaaaacacatgagattgattagataccatttttgtgtcaaccactgtactggasatgttgagatacattatttcactgttacatcatcacaacaacytatgtagaagaggtatcctattccacataagaaaaaaccagagacaacgagcaaaaaaatacaattccgatgttccgtattgatttctgtgttatcatacagttggctgtgtcaatagcgacaggtgaaactaatggcaaattaggaaaaacaaagctctacaaaataggctttgttgttgatgccactaccgttagttgtttcttcagatgcaaggaagcagaatagtataatttaaaaagccaggcactaggaacctgtgccctaagtgttattccagatctgtggttcttcaaatgtggcccataaaccgacagcaccagcatcacctgggactcagtcagaaactctgcagtaggccaggcatggtggctcacgcctgtaatcccagcactttggggggccgacgcaggagaattgcttaagcccaggagttcgagaccaacctgggcaacatagcaagacctggtctctacaaataattatatatataaaaaattagccaggcatggttgcacacacctgtggtaccggctactcaggaggctgaggtgggaggatcacacttgagcctggggaagtgaaagctgcagcaaaccctgattgtgcccctgcactccagcctggatgacagagcgaaatcctgtctcaaaaacaaacaaacaaacaaacaaacacctctgaggtagacaatctgctttaacaagccttacctttggttcagatgcttgctaatgaatggttctcacctctgcctctcattagaatcactctgggagcttttgaaaactgtctgaggccagggtctgcccacagagactgggtttcatttggtctggactgtctaggctcaaatccagtcactggttatgtaaccttgggcacagtacctagtctcttggcctcagtttcctcaccgcataaagttgtgggaattaaatgatttaatttttgtaaagcactgagaacagaggactggataggagcttatcattgttatcatcatttaaaaaaactcttcaaacatttttatatttaaagatggcatcaaaagtttttgtttgtttttagttaaatagcaaatattatcacaaacagctttgcttaaaactagaaaggaagatggccttaggaaaaaggactatgtgaatgtttaggtatctccttcctgaataaagggaataggaagccatactggaaggcccttcattgacaaactgtgtttcagctaatatttttgttgtgtaaacaacccagacaaacacacatgttctttgcattattttccaggacttaggggcaaaagcacatgtatataaaagatgtatcgagatagatctgtaatctatgggcctagcaaacagagtttttaaattcccagttaaaattccctactaaggctgggtgctgtggctcacgcctgtaatcccagcactttgggaggccaaggtgggtggatcacctaaggtcagaagttcgagatcagcctggcgaacatggtgaaacctcatctctactaaaaatacaaaaattagcctggcatggtggtgcgcgcctgtaatcccagctactcaggaggctgaggcaggagaattgcttgaacctgggaggcggaggttatggtgcgccgagattgcgccactgcactccaacctgggtgacagagtgaaactccatctcaaaaaaaaaaaaaaagcaaaaagaaaaaaaaagtaaaattccctaccaacaatacctctagaatagcatttatttttcttactctgaagaaatgaggtatttttaatcataggtactcttaactccctatttgtattagtccgttttcatgttggtgaaaaagacatacccgagactgggcaatttacaaaagaaagaggtttaatggttccacatggctggggaggcctcacaatcatggtggaaggcaaggaggatcaagtaacatcttacatggatggtggcaggcaaaaggagagagagcttgtgtggggaaacttccctttgtaaaaccatcagatctcatgggacttattcaccatcacgagaacagcactagaaagacctgctcccatgattcggttacctcccactggatccctaccacaacatgtgggaattcaagatgagattttggtggcttcgtagccaaaccatatcattatttgaataaaaacaaagtttgaattctgctgaagctaatccagtgtttaaaactttaggagagaattcaacttgaacatccatgagcagtttaactttatttttttatgtattgcgtctctgttttcctctagcagtgttcrcactgagcttgtgtgtttgtgtgttttgtgtggcagtggcatttttttttcttttttgagatggagtctkgctctgtcacccaggctggagtgcrgtggtgtgatctcggctcactgcaacctctgcctcccaggttcaagcaattctcctgcttcagcctcccgagtagctgggactacaggcacatgccaccacacccggctattttttatatttttagtagagatgaggtttcaccatattggtcaggctggtatcaaacttctgacctcgtgacccacctgcctcggcctcccgaactgctgggattacaggcgtgagccaccgtgcctggccgagctaatgtttttatattaatattaaaaaaaagtgtgagctaagaagaaatttaaaagattttgttgtcttcaactgcataaatagatttcagtggcctagtgaagcagaagactgggtagaagttgagtttcatttttaaaaaatatatacacgctttattgcatcattaatgtaaaatgtgatttcttccatgttattttagatatatcttaaactagtgtttttcatttaaaattattattgtatcatagaatatcaaaataatgaaatatatctataggattttcatgaggtataaactttgtcctgtgacaacttacattataagtataatagagacaagcagtaaatgaaattcatatctaaactattttcaattctgctaatccattatcacaaaaacagtaataacacattagctaacatttttggggtgcttaccttgtggcaagcatagtgttacatatttcacaagtaatttcttatttattttcacaactttaatacaaggaaaactgaggatgttaaatccagaaagctagggattagagtagttaatcccttgacaaattacatgctttagtaaataatagcatcagtctctattttataatgtattttataggctagtgattgaatagttttttttttctgtgtcatagtatctgaatcaaagctactatgctgtggtacaatgcagttctccaaatccctaatacaagagagttgtgatttgtgtctctaagggggccagtatagcatagtggcttagagtatgggctctggagtcagggctagactcacagggttgggatcctaactcaaccaccttcaagctatatgtccctggcaaaattccctaactttattgtgtttcagtttcctcatatgcataatggtgaagataatagtatctgcggggaaccacagacactggaccctatttgagggtagagattgggaggggggagaggaacagataaaaacaattattgtgtattaggcttagtacctgggtgatgaaataatctataacaagctcctgtgacacgattttacctatagaacaaacctgaactgtacccctgaacctaagaaaaaaaaaaaacctgacaaatagagccagggaaggtcatgaagagagggttctcatgcttgaatgtgtgatttagaaaagaaagaaaagaaaactctacaaaaaccacaaacctgcacaaagaccatcacagcctacacaataatacttctacaggaacacctatctagcacctggcctgtccaatattgttattgatctttgtagacaagaataatgattgcacaacaattatgtaatccttctcattttttcctttaaaaattgttgtcttcctttaactctctgaatacgcacatagtttactattgcatgcattttcccattgccatgctctattctcaagtaaacatcttttcttaaaaataaaaaaaaaagatagtagtatctgcatcttggagttatagtgaggagtgaaatgggttaaatacttgcaatacacttaaaacagtacttgcccttagcaagcagtgagttgatattagctcccattatttctatcacctagacataagttatttaagattaaaagtagatgagtaacttaatgaaaatgttacagtgtctgaattttttcccatgatggagagccgtcactggcaaagacaaatctggggaaaccgcccgatgaagaaaatactttagtgggatttgtttggtgacttgagaacaacatgtcttgagatgggtagccttggatggggccctgccctgagctgtcactgttcaagtcaaatgtccgttctctgtatggttttagagtattgtggtatttgtaatattctggcttggcagttctgtctcccatggtgaatgggctgagaatctgtatggtggatgggggtgtagttttctcctgaatgcaccagagatgtgtgtttctctattgcttgcattttgctaagagcagaggtttataagacagggattccagagcagtgtggagggcagagataataacacacaatttgccaattcagtttggtaaagtagagatccaaagtgcattttaccctctgaaaggttttattttaagcactttttaggtactaactcatttaattctcacaacaatcctacgaggtaggtaccatattatgaacattttatggatgaggacacagaggcacagagagattaaagtagcttgttcaaggtcatccagctcttaaatagctgagccaggatttgaacaaatgcagtgaggcggtcaagctccagaatccctactcctaattactatactacagtaaggacataaatcccttcacatgcctcaaactgcaaaacctgggaatggcagaaatgatatctttcatattaaagaaaaaggcatgatctcttgtttattaacatcratatttgtcacatagccatggtttggcaatgtttatttcttttaaacagacattattgcaagctacgctggatattgtagagacggaaacaagtaaggaaaactcacccaattatgggctcttactgctttgggcttctctgtctaatgctgttcctgtaagtatattagtaaagtatgagttacgttgctctccactgtcctttcatctttttttccttcatttctgtcttccattcttttttccactcatcactcattatggaaaagaaaaaaactacagtggatttggttgtgagataaaaaccaaaactgaatgcctaatgaaatctgattaggttacaaaggagacgaaacagatctcaagcaaattctgtcctctgaaaggcagtgtgtaacaggatgagggaaaagcttgccctttggggccagttgtagacaacatctgtttatggaacactttttgtatgtctaccaatgtgctcagtattggtattgaaaagatgaatagggattggccacatgcttttattggaaagagtaagtaaatggatagtttcaggtaacttgggcttggatccagacatcccaatttgtagttgtagactgtcatggtggtaatttaaattttctgtgcctccatttcctaataagagataatgtactattttacctaataagggtaaaaaaagggataatgtatgtgaacctcccactgtggtcttagaacttgggtgctcaataaatggtaattctcatttctctacaaagttgttatgaggatttaataagataagcctagctggtatcaatgaatattagctctttctctccatttgtacccattctccttctgtgtgccattcctgtttgcattgcttagcattatggtcctacaagcttccgcatgaatggtgctggtgaaattggaactttcaacacttctaaagagaggcaagacttaaaaaactgttttttgtgggtttttttgttgttgttgttgttttgttttgttttgtttttttgagatggtgtctcattctatcacccaggctggagtgcaatggcgtgatctcggctcactgcaacctctgcttcccgggttcaagcgattcccctgcctcagcctcctgagcagctgggattacatgcgtgagctactgggcccggctaaaaaactgtttcttttaaaatctgtcttgcattagattagagccatgagatttgtctgtcacgtcatgttcagtgccaacagtttcctgggccaggaggttctcacattagcctaagatgctacttatattatctgaaattaaagggtaactttttaaatatacttgttttctactraacaggaggatttaacctatccatgatgatatgtgtgggcatttttcttcctttttcttctaacagatagaaattaggaagatgttttaagtattatttatttagccttacttttataaaggcctaggttgttaaaggctttctcagtcatgatattctagtttcccttaacttgttgaaaaatttactgcataaagagaagggatagaaattctggcctcttttctcaaaggtatgttagccagtggaatatacatttcatctgatatggtcaagtaaaagtagtctaaacccttccccttctttatgtacctataatattcttctctggtttttccttaaataatattcttggaaactgattaagctatagcaaaattgagaaacaaacatcaaaacaactctcaaagtagcaacaaaacaggcactcctgtcaaagaattatttttcaatatcttgttagaaacatcccccggaagaaagacacacaaagccccattgatctgacacaggggaagtcggttctttggaatttgttcttggcgctggtctgaaaggatttaaatcattcatttcagaaagaaagtgtctgatgattagagaatattccatctcactggctcttgttggcacctccaagaggcagcctggtgagcaggcagagatcctggagaggctttagagtcagatccaaagccaattgccagcactgggtaacagtgggccaattgtttaacctgcccaagcctcagtgcccttatctgtaaaatgggattaatgctatacctaccttaaagggttgttgtaaggattattttggtaagaaatagattgtggctaatagcacctggttcagcataggtcttcaataaatgctagttttcttcccttacaaaaattatctccctagtttcagtcaatcattattttcaatggcccgttaatactgaacataggcttccaaatatttgatggctcaaaggccccagagtgggaatatccactgctattctgctttagtgacctttattgctgctgagaataccagaagccctaccagaggtgtaggtggtggggcctgtcttttcctggagcccagagtatatctatatctcctctctcctactttgtactctgcctcaaggcccataggactcagagctcaggcttcagatgggttaggcactgggtcactaggaggctccattgtggcccaagataktaactataatttatgaaattatttttatgggaaaaccatttctaagttccaagaaatttctgactgccaaatgatttttttagaagatttctccaaaccaatcacaaagctgacattttaccttttttatctgctgcatctcttacattctttctaaatactttcagtagcaattgctaccccatcccactctcaactcccacagtatttattttttgtaacatgtgtttgctctctcactgtcttgtacatttcgttcatttttctccaatatgtattcatatgcccaactaaatgtgaaaatactttggacaggaattatctcccaacatatttgtgtttaccatgatcggtagaagactctctggcatggtatgaagactccatcaaaatctctttttgaatagataaatcagtaccaaagaacacactcaattcatcttctctttgacacagcaaagatacagagttttcctccttgccctttctctcatttgttcttacctctccaaaacaatggaatgacattatggtggctgcttctgcagttcagtgagctgagtggcccttcttcttcttgcccatctctgaccttggacttgaactgttttacaaaatactaattggtactgttgggagcagttttcaacccctttcccaaatgtgggtgcacaaagacctcaaagtcacttattcttgcttattgatgtagtaatacatataaacttttattaactattttatatgcctttttatcttttaaaaatactttggcttttttaaaaatagaaaaaawtttaaaaactgtaatctgttaaggaaaaaggagacattaaaaaaaagtggctcacgcctgtaataccagcacttcgggaggctgaggcgggcggatcacaaggtcaggagatcgagatcatcctagctaacacggtgaaaccctgtctctactaaaaatacaaaaaattagccatgcgtggtggcaggtgtttgtagtcccagctactcggaaggctgaggcagaagaatggtgtgaacccaggaggcggagcttgcagtgagccgagattgcgccactgcactccagcctaggcaacagagcgagactctgtctcaaaaaaaaaaaaaataaataaaagtaacagccatttgtagtttagctaaattgcttatgtttgtcatttaaaaagtagtatccaattttattgaatctctaaagctatatttaggcacatacaactatgaacatccgttttgcgtaactgaaaatctaagtaatatggcttggctctgtgtacccacccgcatctcatcttgaattgtaatccccacatgtaaarggagggacctggtgggaggtgattggataatggggacagttttccccaggctgtccttgtgatagtgagtgagttctcataatatctgatgctttaaaagtgtttggccattttccccacccccttcttctgccaccgtgtaagatgtgccttgcttcccatttgccttctgccatgattgtaagtttcctgaggcctccccacccatgcagaactgtgagtcagttgaacctcttttgtttataaattacccagtctcagggaattctttataaagaagtgtgaaaacagactaatacattatgtcttatcactatttttttccccaacatgaactctgactcttcaagtaagatgaagtgagtatggagtagttattaattgaattcagtaatttagcacttttatctgtagttaatagtagaaagggggcctgagtagagacaggacaagatagttctctgagcatctgtttcatcatctgtaaaaatgaactagaaaatctctaggataaatctttcttaatctggataacactcctgaaagaaagcctctaaattgaggacccttggttcccctattcacatcgtttatgtaaacagtaccatatttatccttgcactatcaatttaaagttagaaagggaaaaataatgaacagtattgaatttggcttatttgagcacttcttttcggacaattgctcttcctcttttgaccacagaggggagtattggtattatttaaaggtacataatgttacctcacaaaagagacagactaaatttagtcaaaatattgcatgaatcatttcaggaccaattttcctagatgaaatctctttcataataaatgtatttagaaaaaaatgaaagtgaagcccacacttctttggatgattttatacaggttttctttattacgtaacctaagaatagaagcaaaactatttacctgaggaggaagttaatttttaagatgtaaagcagtatgattttatcttgtaataccacaacgaggaaagatatgaaataagtttgagtggccaagagagaaaatgtgcaaatatactatattcaatagcattcaagtgtgaaaggactcaaaaawttttttkcttttatttactaattcagagccaaaaaaagccaaaaaaaaggactttgtttttgacattgagtactctcataatttagtttacgggatggtttcctgctgcattttcctgggcttatttaaaactactgtgtttcagttgcagaatataaaatgtgctaattcacttgtattctaaggaaattaaatcttaagaaatgtttttgttttggattaatattcttaagtgtcataactagttgcttctgaaaatttaatatatgcctatataatattttgtgttactcattagtaaaaataacaacttttctcatttttagtgaagatagatgtttaatctatttaaattatatagttaaattatagtgacaaaataaaaatttaaatctggcttcttggagatatattacatatctcttattaataatatctagttgttttcaaaatatgctttctactaatgtgctcttaaggttaatttaaacatcatcctttttaaaaaatatatrtatggctaatactaaatatgcttttgttcaccttcaaagaagttcatatttttgatatatgtttttctttttaaggttgcattttggacacttgcatacgtcctttctcatcctgatatccacaaggccattatggaaggcatatcttctgtgtttggcaaagcaggtactaaaccttattatataggaagacacagctaataatgcatgtttgtcacacattattggcaaagctaaatacctataattttataaaaattcaacataatccaaaattcaacataatttgttatatatcaggatataaattgatcaggtagaatcctagagtttaattactgtcaagcatatttttgtgcaactccttcattttccaaatgatgaaatcagtgctatagagattgtgatttgcctaatttccttacttaaatrtatatacacytgtttgttcttctaatgtcttggatcctcacctcaattgaatgaatgtccacagttttcaagttcaggatttttcagattttataaaagtaataagggtatattccatatattacataagagccctaataggactgtagaggtcaggtaaggcttgctaccaaaggattattaaaagacaacaaacaaaaaacaartaaacaaaaagaaataaaaaaacccttatggttgttagaaatttgaggatttaggarctrcaaatagggattgttgccttgaactctttagttcagatgtcagctgtttatttatcatctcttttaaaaagcaaatacaagcttgaatagagagtactcaactacttgtwtattcagcataatttgaccaatctggggagttgacttttttaaacttcttaatatgtcgtattatgtatcctgatataaaaagaataagaaatgatagggttttcttggaagaaaacaatataatattagggcaaaaggtatgatgccagttaatggttttccctctcccttccatgattactgaaaatattttatttaaagttyttttttttggattgcttcttatggagttaaaccaaaaagtaaactggcttggcaaccatgaatatctaartaatattgtctgagccttgagtatgcgtcagcagatgctggaccttatagaaatggtgagcatcattatcattgaatgccaacaatgctaacaggttagattctggaaagacactggtgaatataagakaagacaactggcctttgtgcagcttgcatctacaaaacaaatagaaaggcacatgcccacatgtctacaaatggaaaaaggcaatgcactcttgattgtcacatattctcctttatcatttccttactagagtcttttcctgacttagggtactccaaatttgtggctttaggaaataaaagagtagagaggggatgatggggataacgtggggggtcctctctgacccaaaggccacaacagaagtgtaacattaatctaaatttctacaaggcttgattctagaactcttgaacccagttctagtggagaaagattaaaacctttttgctttttctatgttattgtttatttttaaaacccattgttctcttctgacacaaaaaatgctccttcgaatagtactaccactgcaacagctacattatatgratgctttcagtctataagacactactgcagaattgaaaactatttatgaaagacatcaaactttttttttaaccatacttatacagaagctattcaataatccatacataagatctagtagcagctcaggaatttaaatgttgtgagaggagtccacagatctttggaagctgatatcaaggaagatatccatgtgtccatacaaaggattctgtcaaggaaggaacatttaagtacattcgattagtcaggattctccagagaaatggaaccaattaggatgtaaatagatacatagataaagagagagagaaaactcaaaagacatttattataaaaaattggctgacctgactatggaggctgaggagtcccatgatgtgctgttgatgcaggctctcagtggattggatggtgcacacttacattagggagggaagcctactttactgagcccackaattcaaatactcatctgtcatccagaaacaccctcacagacacacccagaataatggttaaactgaataccccatggccagtcaagttaacatatagaattaaccatcatctaggcatcatctaatctgttgagttttgtttctctggagaaccctgagtaaatttacccacccacrtataggagggcagtctgccctactcagtctactgattgaaatgctaatatcaactagtaataccctcacagacacacccagaaataatgtttagtcaaatatctgggcacccccgatccagtcaagttacatgtacaaattatcatcacaggcatggaacaggaatctgactcagcacagcagtttttctgttctatgctcttgtctcccgcaagatcaccatttccttcttgggaaagtcttttatgaatttccaatgctgtatctctgtggcttcaacacycacttctaggcactttgcccaactttcttataaaacaaatctcagggtaaaaactactattgaatacttgcgaaaggaaagggtcagactcataccacttttctaaaggcagttagttcttgaactatcttgatagctgcctttcagcctactcttgtgttctctatttgtttactttaaaatgaaagctttttggggctcctttgtgaaratgcttgcttagccccaattattttgggtggtgcttttcattattctacttcctctaactaatcctgtacaccttctatctaagtctttattatctaagtctttattatcttccyaagtcttcattatctgcttcttccttttcttgttttacagctgtgtttttattttttaattgcacactttttaatttactttttagcaacagggtctcactttgtcacctggagtrcagtggaatgatcatagctcactacagcctcgagctcctgggctcaagtgatcctcctgccacagcctcctgagtagctaggaccacaagtgtgtgccagcatatygggcttcattttttttaatgggacattgggrcagaggaaggtagaagtgcgttctcaggttgtcatcttgagctataagtttgtgtgcatgtaacatgcatcaacttataaataaaattatatatatataatcatakataattaacataccataaaatttatcctttcaaagtgtgaaatgtagtagtttttagtatatttataagattgcaaccatcaacactgtctagtcccagaacatttttatcaccttcaaaataaatcccatacccattaggagtcactttctgtttccttctatttctagcttctgacgaccattaatttacttattgtcctgacacatttgccttttgtggacagtccatataaatggaaacatatgatatgtggtcctttrtgtctggctcctttcgtctagtgtacagttttatattataatgttttacattaattgattttyaggtcttgaagcatccatgcatttctggaataaatcctgcttaatcctcatgtataattttctttatatgttgctagattcagtttgctagtattttttgaagtattttttttgaagaatctatgttaataaggaatattgacttataattttcttttcttaaaataactttgtctggttttggtatcaagataattctggctttagagagtgtatttcttcctcttctaatttttgaaagaggttatgaaagattgatattatttcttctttaaacatatggtagaattcaccaatgaagtgatctggtcctaagattttctttttgagaagttttttgattaattcagtctttctacttgttactggtctatttagattatctatttcttcttgagtcagttttatactttatgtctttttaggactatgtccatttcatctagattatctaatttgttggtataaaatttttcatagtgttccacacaatccattttatttctgtaagggcactagaaaaccaaatatttcattcctgattttagtttgggtcctgttttaccttctgggtcattgtagctatatatttgtcaattttgttttcaaagaactcactttttaattttgtttattttaacttgattttatttttcctagtgatttttgtatttaattttgttctaatctttacaatttctctatttagttctttagaaaagatttccttagttctttgaacataatgaaaatatctgatttaaaatctttrttaagtccagcaacagtttcttcagggaggctttctgttgattcctttttttcctctgtgaataatctattcagacagtcttctacttatagtggttcaactcttgattttttaactttatgattgtgtgaaagtgatacacattcaacactgtattttcttatttcatgtcttatttcatgtttcttattatatgccttataattctttgttgaaaactggacattttaaataatagaatgtaacaactttggaaattagattcttccctttcctcagggtttgttgttgttgctgtttattgttcttgttgtttgtttdtttagtkaytttccttaactaattctgtaatgtttgcattctttgtcatgggtggccacagaagtctctgctccattatttagtgatcaggtattaactagacagatatttctttacctcagtaatttagaagtccccattctttgctaagggactgtgtgtgcatgttggccatgccttcaacactcagccaagcagttgacaactctgccttagctttcrctttctacctgtgccagagcctcaaggatgggtgtacatgacagcttgtggccttctcrtgtctttcctgaacatgagtaaagccctgggcaaatggatgcccttctaaattcctgggaattcattagacctctgcaaagccactatgaacaactcattccctagcctttcattttcatcttgttggtttgcctgttgtttgtccaacagttacctactgactcagatagttgcaaagttaaacagttgtctttaaatattttaaaccaacacccctggaggaaaggcttttcatactgagtgagctccaagtcatgtcaaataaagacagtcttgcaagtaaggtcttctaggaaactgccaaacttgtcrcataatgagaatactgtagtamtgaggtttagaagaagttccaaccttgttstgccctatctagtgactgtgggttkttgattttcactgtgaatgcagacttctggcttttaaggcttctatggagatataragaggggtttgagaatagggcaggttaaaatgatgttaagcttgatgttcttatcaagattcaactgtttttttcttgaatagacattcttgaattgctgcaaaactttggttaatctgtagaattctaaaaacttgatacttagaatttttaccaaatttcttattgcttttaaggagggaactttaggagatccttgctctgctatttttactgacatcaccctgaaatataagttttaaaatttctttrgaaaacctcccagrcttatgtggattaacccttaattcatccattattttacttggccctcaaacttattttttgagtgctcaccatgtgaaggcattgtgtgaagtaccagagctatgaagatgagtaaagtaacagtccatrttcttgcagaaacttatgaactaagtgctttttataaaaattgaagacaggtttggaagtatccagaagatattaggagagaaaaaggaatatttacattgtttctttggagacatgtacctactggtaaattcagtaagattcctgtgcctggaactctttctcttactaatctttcagtcagcttgaatgtctcctcttcagatagatattttagtcttaccccatctaaagtcactttccccaactctgcccttggtgattctctgacttgtcttactctatatttccttaaaagtaagacaagttagagaatcactaacttttaaaaatattttttatttgtgtatttatgtatttaccccaccaaaatgcaacgtctccaacaacagaaactaaacatagttggtctttgtagtacctagctgcctagaacttaaaaattattcaacaactatttactgaatgagtttaatgaacaaatgtaagaatatatggctagttttaagagataagtatcttggtctagcctctgtttgcagctctatcaaccatcccatttgacattttatatgaaacgaatgttttatataaagactttttgacagttttctgcactgaattttgagttagcagaaccctattgtatgatggtcagtcagttgggagccacaaaaggagctagatcctttattaggatttccacaggaaaggcagagaagggacaagtcaacagtttagcattagctagtttgaataatccccaggggctctaaactgtagagtggtttctagtggcctgatatctggccctgagatgattaaggcagaggaatattgcttcttgggttatctgggccagatagargggtgtagttctagattggttgatttgcatgtcaaaggtatgctccaggctgagttctgtgccaactggaagaactagcttgccccgagagggagaggagcaatctctccccagccaggaaggttttctgtttcttttaaagatgttatacatttaagaaatattattttaaaaaaatttacacacccacacaaatcattatatacagaaaattaaaaaaaaatacgtaatacacctagtcccagccaatatcttatcagtactttgagacactgagtaatttcaagcccagtaatccgtatgaatggtaaataatgttaacttttctctaggtttttgatctctgtaaagcattttttttgcctatggttttattttgttccttaattttgggtgaaacatatattaccaaatcattgatgatctgataaagaatatttttgctttgttatcaaattttggggtataattcctagaaattagtctttttgttttaaattttaattgataagttactacacattatttcaattgcctgtcataacctcataatgtagtgtggacactagggtcagactgcctgagttgaaatccaggtggagacacttattaatggtgtatctttactcaagttatcaagttctttaagcctttttcctctttgggaagatggttaataataatcctcatctcgtgaagttattagaaggatataacacatgtaaattagatagatagcgtagtacctggcaaatcgtaattgctttgtaagtcttagctatggccaaaactgatacaactatatcagttatatgaaattttataatcctcccacatcatgaaattagtaactgttgtaactttgagtttttctacttccaaatattagtcagtgttgttttttgaaataagatagttttgttgaatgtttatagtcagaaatgaattactttcatatgaattggctgtacttttggtggtgtcaaaatgcagcagaaatatagcatgagactatttatgtctaatattgccctacaagataggagtagtagaaacagtaatagttaatagtcagcgctaattaagtagcaggccctattttaagtgctttccttgttggcttatttaatccttggatcatccttcctaaacattattgtttgccctattttatgcacgaggaatgtgaaatcccaattagataacttacctaagaccatacagctagcaagtggtaggggtgtgagttgagcctagtttgtttggcatgaaagttgacaatacaaatcagcaaatctccttgtttcaaaattgtacttagaatccctgaattatgatgcttcaatccaatttccagctttattctgttccaagttgcttccactttaatcttcctaaagcatagctctggaggtatgctatatgtatactcagaaaatgttcctggagtaacattcatacccctgagcctgatacctgtggccatgatggtaggtttgacccacttttgcatgcagaatcacaatctaaccaaggtagactttggaatacccactaamaacactctgcattttgtttctgctatgtattaacatttataacactgaatatgatttaattctaatatakttataaaactttacatataagtaaacttatagattagagaaaaacattttctaagccattcacctcatttttgattcaaaaaatatgactaccatatttataacccagttgttttccaaaacaatatgatgtgtctgccaagacamtagaattacccaaagaaattaagggccacttaaccagggcactttaaccagagcgatggtctgtagtttatgtagacaatcatctttacttgttgcatacctataccttcttctgaccaaggccacctggacatgtagatcccaacccccctaattacctctaagattttgttccattgatcgatcgccaatctcttggtgggttcaacttctctttctccactggctcttttctctctctctgtcagattgtggtattcagtgcacacatccagtgacctcacatctcactcagaatgaaatctaaagccttcaaatggcctcagagactctttgtcatctgattcctgtctaactcaacgacctcatctctgccctttcatccttgtttattttaccccagccacacccattcatttattaattcagcaaatatttgttgcactcccgttatatgacagggactgctttaggaacttggaaatatgaacaaagtaaatattacttttttcttggtgcttacattcttgtagaggatacagacaattaacaataaatgtaatacataagtaaactctaaaagtaaaaatattaaaaggtgataaatgggtgggcatgatggctcatgcctataattccagagctttgggattgcttgatgcattcaagaccatcctgggtaatataatgaggctccatctcttaaaaaaattgttagctgggcatggtgccatgcacctgtggttctagctactcaggaggctgaggtgggaggattgacctgagtccaggaattcaaagttgcagtgagctaagtttgctccattgcactccaggctgggcaacagagcaagatgaaggaaggaaggaaggaaggaagaaaggaaggaaggaagggagggagggagggagggagggagggagggagggagggagggagggagggaaagaagaaagaaagaaagaaagaaagaaaaaagaaagaaagaaagaaagaaagaaagaaagaaagaaagaaaagaaagagaaagaaagaaaggaaagaagggagggagggatggagggagggaaagagagagaaaagaaaagaaaagaaagaggagaaaggagggagggagggggggggggagggagggaaaggctagagaaaatcaggaatgtcagggatgggggaaggtggtattatagtattaaatagaatcagtgtaagccctaattggcaaagtgagatttgagcaaggactttaagatgttaagagttagacaagcagatatctagaggaagagctgattggggtcagagacagcagatgtggcctcactgtgggctcacaaaactctttgagatcaccatcatgatggcatttctgttggaagatgtttgtccttttttttttttattccagaggagaatgtgagcacatttctaaaaaatggttaatattaggttggaagaagagattcaggaaaaagcttttctttctttgtcacattattcaaagcaaaatttgattcaactctcaatgcgtggatttttaaataaaaaaaagaggatgagcatttggttttgattcagaaaatatgactaccattcagaaaatatgacaccagtacacaggtgttctagttaattattgcactgttttaaaaaactgtcattagacaagtttgaagtatcatgagaaaggtggggagatatcattgtacttagtctgcttttatagagtctttaagcgaggggtcactagcctgggaatagacaaggagtgtatttgtatatatacacacagacatgtgcatatataaatatatgttatgtttataaaaaggtatatagttatagttataaaatgtatttatatttataaaaatatatgttcataatgatataatatattttttatactcatatatattatttacaaacacacatattgatacgtatccatttttggccacgcaaaatctgaaccctatgtttcaacagaaacttgcctaccatagtgggcagaaaaatgctagatttttgttttccttgccttccttgaaactaggatattaccatgaaaataagactttgccattcagatctaccaacccaagactttgaatcaagagttactgaaataaagaaatggagactaaaaaattttccctggaagcaactgcaggtattgcaggatgaagtttctggggacacagcgtcattcagtatcctatgccagtggccacaatgcacttgacatcagtggcagtgtcatgcttgccagaccagttctgtggcctgatttggagcaagattcctggctatgcatccttcaagcctggttgtccagccctcttaaaagttacataaactacttaacaaacttttaataaattattattattttactaaatcagctaggtttagttctgctgcttgcctctaacagatcttgctgataaaatatagaaagtgtaatgatcagaatgtccaatatggagaaaaaagtagaagtgacaaagtcagctatcaggaaaagtgaatggagccaaaggagaaaatgagcatactctcctgtggtggtataaggggtaagatgaagaagaaaagacacatctatccagattttatgctgtgatcaatgtacagtggactttttacattggaaatgtctgtaggaagcagaaagtcaggtgaaaagagaactgtgaaagccatgaatccagcaggttcttgtgtgatggaaactcggaaggactagggatatacttccatgacacctctcctctttgtatgtcctctctaaatatggtaaatcaagttatttggctggtgcaaaagtaatggtggtgtttgccattagtttatttaccttatttagagaggatgtataaagaggagaasatgtaatggcttccatcaccactgagacatttcttcctcctgtagagttttatgtattctcaatatggtgaatattattgtatccacagagctgaagaataaagttatctatctttttactttgacattaagctatttagtatcacagattccattttatttatttaaatatttacattttaatttgtttaaggaggatttcatcagcctaccattatggtttacctttctattttaattaaaatataattttatttaaatatttagagtacatatttagatgtggtgggtttttttytttttgcttctttgtgttttgtttttttcaaaataactactaaagtaataccagattgtaaaagattaattgacagcgtaagtactcacacttatgggtaactgacctaaagcaatcaaagacattaatgtttagctcctgtgtaggctgtgttataaagtaattttcatttctaattcagggctcccactgtgagaatctgcccatcaatagaggctcattctttcctaaaaaaaaaaacaaacaaataaaaatgtgctggaatttttttcacttttgcatttgacttttccacctatgctttttaacataggatagcatacacatgcacccattttattttatttttttgctgatcagttttactttgcctttatttaaacaataaattaataaacattttctgttaatttgcaaggaaccagattaattaatagaaatgcacctgcatagaaatgattcctattttacataaaagtcatgatttatgcatcataaaaggcacatacagaattttcattggattagagagttagcagttggattcatgaatttcaatcttgtcactcactaattgtgtaattgtggatgaaagagaaaccttgctcagagccaatcaacagtggtttttggtaccactgtgttttgatttagcagcaatcctgactagggatataccaacactgtgggatggccagcgtctgttacctggtgacattgacttaggtagctacacgttatacactggtgaggaaagcgtctgactcttctcataaatacaaacaagtataaacactagtaaagtgaaaagtgatattctaggtaaactccatattgtctgctttattttaattagttgattagttttactttattgcatttaagcatctgtatttattcttgaaatcttatatattgtcattgtttacccatattataacttgtatgcagcttcccttcacttgggtgtgtctcagcaccatcttgccaaccaataacaaccttcttggaggactccatcatggcatattgtagacctgagtcccttcagtgaacttaagctcatgctcactacccaactgcagcctgccagggcccaatggctgatggccaaagttgtgtctgtgacagattcttggccccttgtgcgatgcattgcccaaaataatgaagaaagagatcaaggagcagagccaaggacgctccagtggaattgtgaacagaaggaagttattttattttaaaaaattatctccattcccaccagtagcctgacattatgaacctaacacagagattygggaggctatagcttatcatgcaggaaatttctcacatagcctcatttacctttgctagcctagcttttaaaatccaagaatggacccaggaaattgtagattatggaggagcttcttacaaactacttctcatttatcaaccttgaagaccacatatagattacttaaaaaagtatttataaatgcaagaaagttcatttgaaactattctttctaccccaaatatacagtttggctatcttcttattcccttggccttgaagatcaggatgatgtcattttggaactcataacttgtgattttcctatctactaacctagccataatgactagggtgagacttgcrtgtctaatacctggcccaggagagatttctcaggaagctttatttcttccactgttttctacctttaatacccaaagtgggtcttgtgataccctagctcaagagattttgtgtgaagtcactctctcctttttcattgcttagcttcagtggctgaaagagatgcctctgatagctrtagattatttgatatccctgttcatatttataagcttggagataggttctactctggtgcctctcattttaaatctttcactatcttattctggggcagcactgttgatctgctttatttgttctctacattttttcatttagacacaattctttcttcagagcattctgttggtgaatttttcaaacatttggataatcttttttttattctttaggaaatactaaggtaaaaactattaaagtcaggctgacatctctccagagaacataaaccaaaaatttggactcagactcagtacactggctttatacataagggtatttctagatcaaaatttatttcacatattattatctacccactgttatcttctttaggcaatattctctcccttttatttatcatgtattggactatatcctttattccttgaaaaaaaatcatgattatgaggcatgctccatttttgtcctccagtagttagagaaattgataatctcttttttaaaatatgagagaagcacttcttaaaataacaccaaatattatttttcagagtagaatcttatatggttgacttggtatagtggcattgaacttcttttgacatgatagaatgggatttgggatatttaatatgtgcacgtactgatggaagaaagagttgggagggtcagcctgtcaattctccttatcttccattggatgtaataaccygttctcagaaacgttgcagtcagtccttcatatctttcgcactccattgttatcactgccttttccaggctttgcctattgttatgaatgtcaaactgaaacagctgagcaggatctacttccaaaaggttattacttgtaatttttcaataggaatatgtctttgataataaaatcttatcctaaatccttcacatgccaaaaggccatatccatccttgtaaaagtcagaactagagctgaaggccagaaatgactgagatgcttggaagaagctggtggctggaggaggagagtagaaacatgtgtggtttgccaggctactgctacaatccctgaggccccagtgctcatattcccagagtccatggacaatctctaggcttattatttgctytccccagtctgtattcaccacagatactttaagctgctttttaagccttccttctcatgttacatctctccttcctattcatttaactggtatttctcttgcataaagaaatcagactggggcaggacctatatggaggaaactacaagatttttaaaatatgtatgttttaaaacaatctaaataaagaaaaaggcatatcaccttcctggatgggaagatttaatatgaaaatacacttttcagattactgtacatataatgagaattccatttttgggggagtgtagttagctaaatgatttaaaactatatagaaaaataactgtgattataaataaaaattattagaaatgtgaccaggtgccgtggctcacacctgtaatcccggcactttgggagactgagatgggaggatggcttgagaccaggagtttgagaccagcctgggcaacatagtgagattgtctctatgaaaattaaaaaataaaatttagtcggatgtggtggcatgcatctgtagtcccagctacttgggatgctgaggtgggaggatcacttgaacccaagagttcgaggctgcagtgatttatgatagtgccactgcactccagcctgggcaacaaagtgagaccccatctctttgtatacgtgaaatgtaaattagtaaggccagattcaccctaattaaggcyagattttaataagttattaaagcttattataaaactgctataacaaaagagtacacaattggcacaggaaaaacaattgatccacataacccttgtgtatcttttaccaataaaaatcaactttataatcttctctttcaaaactaaaactgtgggtaaatagtttttttaaaaaattgtttcacattgtcaagacaaaatttcccaaacgatctacatttggaaagaattaatattctagaaacctgcactcaatggagagaacctataaagaatttgcggggatagcggtgagtgaaaagacatttaacttcacagctaccatcatgatctttcatctgctgtcatcccctcttccttgaattttctataatttgacttattatctttcccatagatattttatcttacacaacatgtataataataaacgtgtgcaattacaaaagagataaaagttttttaagaaacaacaaacccaaatagtaaatcatttttctttgttaaagcaatatttgggaggtaatatagagtattgatttttatattgaatttttgaagggtctctcagcacagtaagcttacaagttgcttggaatgatagcacaagccttgtgtgttaaagaaggctggaatagcttatattttacatatgtgtcctcagctctggagcttccctgtgtggacctccttctgtttttcctttcttcattttcaagaggtttctgtgagctctctgactgaggcaacaagacataactaatctccagggacccattctactcttttcaaaaaagataaatcaatttttttgatgttaggaaaatcacatttactgtctactgattttaggtacccaataaatttcttttttttctttttttttttttttgagacggagtctcgctgtcgcccaggctggagtgcagtggcgcggactcagtggcgcggactcagctcactgcaagctccgcctcccgggttcacgccattctcttgcctcagcctcccgagtagctggaactacaggcacccgccaccacgcccggctaattttttttgtatatttagcacagatggggtttcacagtgttagccaggatggtctcgatcttctgacctcgtaatccgcccacctcggcctcccgaagtgctgggattacaggcgtgagcccacggtgcctggccctaaaattgatttttctattcggtaatcaaagatcagtttcacactatttcctttcaaaattaaaagaataattgtacaaaagtgtttattgttttctccatttagagacaagtcaacaaatactcgtctcacaaaaaaattcccacaaatctgtaaccagcccattctcgctatctataaataactgttataaagcctgttgtaggccaggcacgatggctcacgcctataakcccagcactttgggaggccgaggtgggtggatcacctgaggtcaggagttcgagaccagcctggccaatatagtgaaaccccgtctctactaaaaatacataaattagccgggtttgtggcaagtgcctgtagtcccagctactcgggaggctgaggcagtagaattacttgaatccaggaggcggaggttgcaatcagccgagattgtgccactgcactctagcctgggcaacaagagtgagactccgtctcaaaaaaaaaaataaataaataaaataaaacctattgtgaatggtattatctacttcagatattatcacctccgtaagagtgagtatatattttattaaaaaatagatatataattttaaaaaatggaattgctgaacattacttttattgaagttttaaaaattcctgaaatgaagggaaggatgtaagggtctcttttttcccactctagaatactgactattgtaaagttttatttattctttatctttagctttgtctctgttctctaaaaactgactttgtagaatcttatctggaggtctctggttgagaaaataagccagaaatctgaacagttacagttttctgcccttattttctcacaggaattgttgtcattgcttcattatttttgcrtagaagtcatacaaatgctatatattttccaaaactattgaataattttctgaagtgacagtataaacactaattttttataatttggtttttactttttgaagatattactattgtaaaatttgaagagtagatgtattgaccaaatgttgatagaagtcattgctgaaggttattgaatcagtttgtttgtttttcatctattatctcatgtatatttattccaagttcattctccttcatgtgcactatgatcttttgcacacacttcaactttatatattttaaacaagctgttctaggaatatggaaaggcagcctctgagaaggaaaacttagtcatgacacagaggagcaaacagcactgagaattcatgctttcaaaagtaatgaaagaggtggtgaactgtgttggggttgcactctttaaatcttggaaggattttattatttgcatttttttcatcttttcattctgattttcattcttggagaagcacaggggtttcctcagtattcaactccactttgcaaccccaccttctggttcagtctccttgaaattatgtttccaaaggtctgaatgagttagtaaatgcctaccattccccttcttttctggcaaaacatggattatttccccaaagttattagttaaatttttaatgaatattacttcaaagctgtagaaacaattatatgtatatttatttatttacttactatgtctgcatgtatgcatgtgtgtgtgtgtgtgtgtgtgtgtgtagggggaaggggcttgaaatattaaggagctagagaagccatctctcaaagaaggacatcctttagtgattctatttgactcatgttctttttttttttttaagcccaagaaatttttgtgattaattttggaatttaagttagcattctttctgactccaacccatccttccaggcttagttgaaatttcagccctaagtgagaagagacacttgaattctcttatatgaaacttagagatatttatatccaggtattttttgtgtgtgttcttgtttccaggatcctttaaggcagtggccgtgtgtttctcattcccttcttgtctttgaggaagcaatgtggcgtagtagcaaggttgaaggctttcagtatagacagacataggtttgaaggctgctctgatactttcaagcttgtctccttgaacattttaacctctctgaggctcagttagctggcagatatctatgaggaataaatgaagtgatccaaaatatttgtgacattagatgggcaataaattagttttatttcctccctatctcttatagcacctatgcttaggctagcacataacagatatggagcaaatttacattgagtgaatcaatggctaaagtaatagaatttcaatttgttataattattaacaaatataacatatgtaatgtgttataatacacatcattatgagtatgcaatcctaaaactatgtataatgttttataaactttttttgctatttctgaacgcaagaatcatcatttcttttacttgattttcaacatcctaaggtttgccttcatcatgtttatgccaagagttaaacagatggtttctgaattttagcccaaatcactcagtttctttattggtctgtcatctgtactggtccctgtctccattagactgtagcccttttcatgattaccttggcattcttccaagtgaagccttctaattttagagtcacaatgctggaagaacaaatcacagatgtgcattgaagtatgcacagtatgggtacggagctatttctaagagtcatagtaaaaaaggtcttttacactaaagaatcattcraaaacttagtgtatttccttttctttttctttgtatggtccaagaatgctacattatttttctcacatgacactgacatttgagaaactaaaaatattttatcaaaatatttattttccaaatgtaggctacatctctaatacatttataggtcataattttaaatgttttcaattcaaaacaagcttctgtttctatattattaatatagaacgttttaccctttttaacttactaagagtactttatccaaaaatgtttttctgaaggaggtcaagaacttcaccattactagagtccaaacttttccaagaccagaattatgcaatatgtaggtcactgtggagtctcttggattttcacagatctgatttcaaacacaaactgaccgtagttgccacctatccttggtcaagtagaaagatacttcttttcggcatcctatagctgcagtaaaataaaatagaaaaaaagtagaggaattgtttgattgatttgtccagtgtagatgctgtaaatagattttgagagaaaacaaattttttgaaaagtaagatctagaatttaaattgtaagctactgctaatttatttataatgtccatttgtgaagggccctagcttgctggaaccaccttggtttttaaaataaaggtaaattgtttggaccccatctcaggtttctaattatctttggagggagaaatgggagaggaggcaagaggtagaggcttgtgttttttctagccttctcttgattcctagttcctgcatttgctgattttgcaatttctaaactctttcccttctgcgtgtctgccacgttttctgcattgcattgcctcactggacatcctccagctctttatttcccaaagtgttaagttaatgttagctgattttattaaaatattaaaaatatgggacaaggaaagtaaaaattacattgcagtcagaaacaaaagtcctgtctgccaaagaattttccttgacactctactaggttatcagtgacctatcattgaagctgggccctctctcttcttggaaatccccagctttgtcttccttaccttgcacactggcagccccagttgcctttcacttcctgtgcaaagctgctcactctccctttgtctcaccatggacattcaggggttctaacataggacttcatcttctcatatatactgctaggcagtggttttcttgctttctttttctagagtacattctagaagaagcttgtccaacctgaggtccgcaggccacatgtggcccaggatggctttgargtttgtgtttgacccaacacaaacttgtaaagtttcttaaaacattatgagattttgcatggaccttttttttttttttaagctcatcagctattgttagtgttagtattttatatgtagcccaatgcaattctttctcctccaatgtggcgcagggaagccaaaagattggatacctgtattctagaagaattttgtatcccctcatagatttttaaattgatgtctaatagttgctatcttatgtttaagtaattgcaaaggatatcattcctggtatattttctacatgttcttagtctatttaaaatacatatcaaaagttacaggtttattatagttcactcagttatgaaaaatgggtgccatataacctaattctcaaagccagttcttattaccaaactaatcatccaatccaatttatcttctaacagaaaaggtctgatttcattctttcaattcaaataaacatgttaatatgtgttgctgtgacactcatctcacttttgaattctgattcgtagatcatcaggtggacaaacatggtttgtaagcaaggactagtggacaaataggtgaaagaagacatgtctgcttttggtatttctttcctgtgcctgttttactttgctctcaagggcttttcccttaggttccatgtgttatctaattgcccttttgtttggcagccaagagatgtttatacctcaaggaaaaagcactagagtaaaaatcgggatagctgagaggcaagatattccatcgtaaagtcaggaaaaggtgattgtattggggagatgggaaaagagaattgggccacagtcttttattcaacagatcagttttagaaaagagtgaatatggaagttgagtatcagggaattgatttccttaacatttgctctcatgtgccctctgggtatgtgaatataattcgaagatgattataatgtattctaaacaaagacattttccttataaaatatagactacctctcagggaaagaaattttccttgtaaaatatagactacctcttagggaaagcatattgtaaaataagcatattttacagggttatccagatactatgctaggcattgtatacttgacttggttatataaatgatatgtacagcgaagactacatagaatttatagtattgtaaaattcaaatgctggaataaaatctggacttctaagcaataggaagtacaatgaggagcaaaccagtagcttgtccccttgatgtcccctaggcaggggcaaactttttctatataaggcagagagtaaatacatagcctttatggaacataaggtctctttcaccactctgctattgtagtgtgaaaacagccatagacgtgtaaacgagtgagtaaaccaaaaagtgtctgagacaggtctcaatcaatttagaggtttattttgccaaggttaaggatgtgcccgggaaaaaggaatacaaaaccacagggacatttgtgagtcctgctttttccaaagagagtttggggacttccatgttcaaaggaggaagaacaggcagtgggggaaagaggaaggggagaaaaaaggaaggagggtagataaaaggggcaaatgcttgcattcttttgggtctttgatcagtgttcactgaatccacattttacatgtgaaagaggtgatagaggaatagtcaactgtatattcatctagcccacagaaaatggtcaatttatataagtaaacatagagtagctacctgtggagacctctggccttctatctgtagctatttgcttaggaacaaaaggaaaggcagttccagcttaatatttccctttggcatagtgaatttgtggtcctgagattttatttttctttcacatttccaataaaacttcatttacaaagtcaagcagtgagctggatttggtctgttggccataatttgccaactcataccctatgctatggctgcatacaggggagaaggagaatagggtccaatatatgtggctgcatgtaagctccagacttttgtagstgtaaaaatgatataattttgaaccatttatgaaatcctggccagttaaaaattcaatcataattgatcatcacattatttagttttattgttcagaagaagaaataaagctcccccccccccattttatatttagtggctttcagtgtcaatatatccagtcaggatttctgattcaaatcataatttttacccactaagtgtatttacctacattttataaaatagaaaagataatttaaaaattggcaataataactgctttaagcctagactatctaataataaaatccaaggatgtcttctacctcttttaattcagcactgtggktcttttttttttttttttttttttttgagacatgcaccaccacacccagctgattttgtatttttagtagagacggggtttctctgtgttggtcaggctggtcttgaactcctgacttcaggtgacccacccacctcggcctcccaaagtgctgggaatacaggcatgagctaccacgcccagtccagcactgtggttcttagagtgtggtacctggaccaagagcatcagtatcacctggaaattttccagaaatgcaaactcttgggccccacatccaacctattgaatcagaaacttttggatccctgcaatctgtgttttcacaagccttccmcgtgatgctgatgcatgcttaagatttgagaaccacttctctrgtatatatcaggtttttactaactcttttttacttaaagatttttacattctccctcagaaacgtctttcaaatttgacttctctacatacctcccattgctgttacacaaattaaaagcttcctaattaacctcaccttccaccattttagacatgcattcatccatccatccatccatccatccattcatttattcaataaaaatatatagagtacctactgtatgctggacactgtgttagatactggatatacatcgaagaacagatctaacaagattctgaaacacatgtaatcacatcctatttgggggatcccgggttattttatatattaataggaactataagggaaataaaatgaaataatagtgattagggagatgttagttggggtggccaggaaagggtttctgcagaggagaatttctagctgagagctaaaaggtgaaagggatccagcctttcaaacagttggaaaaggcagaggaaataataataataagtaacctgaggaygggcatggtggctcacgcctgtaatcccaacactttgggaggctgagatgggcggatcacctgaggtcaggagttggagactagcctggccaacatggtgaaaccctgtctctaaataataataataataataataataataataataatwggtaacctgagattttgccacatgccaattatagtggtaagcgctttacacgtattaacacttttaatcctgacagcaaccttgtgggcacgtactttctgtatttccattttatatgtaagcaaactgaggcatagagaggttggataatttacaaaggtcacatagcctctaggattcagtgtgagatgggactagagggatagatacggctttatttgccaaagtgagaatgttggatttaattctaaatggtattgaagccattcgtgggtcctgagacggtactgacttggtcttatttacaaaggggttgtagaggagccaggtgggagtaggaagcatgatgaaggctgtcaccctggaccaggtgagaaatattcacggcttggacaagagtggtagcaatggagatggaatgatgtggatggaagtaggatttagtttgcaaataaaacaaattttgctgattgtttaagggagttaaagggaaaggaaggacaaaggaaaactgtttctctacacacaacacttctgacaccaaatgtgtgggttttccacaccaaacaattctccagttctcttcagatatcaactgggtgtcctagaacttaattcaattctgacactaactgcatgacattatcacagacccacaggttaggggctcagtcccgcaagactctccccaacttcagatgcccattgaaattagtacagccccaggttattcacacttctgtccaacttgtctacaaatcgggagttttccacaaccacctctctagattcgataatttgttgtaagggctcacagaactcagggaaacactatgcttactatttctggttcattacaaaggatattagaaactatacacatgaatagccagatgaggaagcacatagggcaaggtttggaagagtcccaagcataggagcttctttctctgaagttgggtgtgttaccctccggcacatgcatgtgttcaccaacccagaagctctttgaacccctttattgagggattttatggaagttacagtacaaaggcatgattgattaattcattctccattggtgactagctgaatccccagcccacctcccttccccagaggctggggaatggggctggcagttccaatcctctcatctcatggttggttcctttgacaactagcccctaatttccaagagtcacttcattagcatagtcaggtgtaatcgaaaggggcttatttgctgggcagggtggctcacacctgtaataccaacacttttgaaggctgaggtsggcagatcactagaggtcaggatttcaagaccagcctggccaacatggcaacaccccatctctactaaaaatacaaaaaaatagctgggtgtagtggcacttgctggtaatcccagcaactcaggaggctgaatcgcttgaacctgggagtcagaggttgtagtgagccaagatcgctccactgcactccaacttgggtaacagagcgagtctcattgtcaaaaaaaagaaaagaaaaaagaaaagaaaagaaaagaaaggggcttattatgtatgaataccaaaagatgctcctctctcccctatcattcaagaaattgcaaaggttttaggagatctgtgttaggaaccacagaccaaatatatatttattatatcacaatatcaaacagaattatcatggatgatttttaggtttgaacttgagcagctgggcaaacattgttaccattttctgcgatggcaagaccaagggaagaaaggctttatttcagtggggcaagtgaagagttctgtgtaggccagtgttgctttgagatgccttttagacctgcaaacaaagccaatgagaagccagctggataacaataatctggagctcacaaaagggatgaaggcaaaaaatgttattgtgggtgtcactagcccactgatggtattttatagaaaagggtttgtttgagtcccccaggaggataatgtagagaagagaagagggcccagaactgacacctggcagtcttgggrtacattcagaagttggatagcgggaaagatacctcctgtcatctctggattcatctggtrtgagcagactggaacctcagtggaacacccttggaagagagggtggatccattaccaaaccgccaagaaccagtgcgacagcttgttctgatctgcatctacagttgattgacctagtcacttgctacaccagactctatttcacactgaattcctgttatctgaacatgctctttatttttgtgtatctgattttttcttcagatttttttcttctgaaaagcctctctgacacctccctcccccgtctggtcactgtcaccgctgtgctcctatagcgagttgcacactttaatgtgatagcgcttattgcattaaccacttttagttctctgtcttctctatcagactattcagagccagagacatgacctacatcttcatactcagcacttgcaaactacctgtagggtctcagtctctgcagatatctactgaacaaataatggaaggaattcctcagacctggcccccaattcgtgttgcatatgcaaccccacacgccaatctctaaattttctcccaataaaggtttcaggaaaaagaataactttattagctatggagtaaaagtagataggaaggtgtggtttctaaagagtcattattaaattcgcattaatagtaacggtaataataaataaaaagtaaatcagcaccaccttgtactgaacacttagtacataccgggcactgctctaagtttgtgtgtcattcataaactaattcaaaaattagaacctcaggatttctcattttaacattgtctaracaaagcacttattctttctttaatttttcatcttatagtctttttgatggtaaagatctccaaaacttaaatttcttatatttccttagcactttattctccagtgaatgccaaacatttgtctatttgatttagcaatgatatctgttacatatgcaaaatctcagccacttttcaaataaagaattctgaccatggcttttctaaattatttttccgaattagtttagaaaatgttgggatagtttggggaaaatgtaaactaagtaaaatgtatggtacccctgtctttccatggtgtatcaagacagttttcagttggtgatcatgttttagttcttaataactactcatagattatgccatgtgcacgaaagtttatgccatgtgctagtaatcttcagacattaaaaatagggttggtttgctttttcggaggattgccttggaaataatctgtatcctaatttatatagctagttatcttttatgtagctaatgatttgcttgtatggatattggtagaagacagattccatgttacaaaaagtttgagaatawcagtgtaaataactgttttattgcaggatttctcaaagcctgtaatacactaatgtgtccagtgaatcaccaataacatgtagcatttttcgtatttggttgcccatgaacctttttcctccttcatacgtttgacatcttgcaaatatttcatagaacacaatttggaaaaactgtggcatttaggttgtgaagatgcagaaggcatacttattgttttccaatctttgttacggaaaaggaaaaccaacagttttgttgggcaatgcctgcagagattacaacaaaaatcccataaaagtgcttatctccttttaatattagattgctcagatctgagcaaataagccgaaggtcttaatttaatacagaatagtgctgtatatcactgtttcattgttgaggtgttaacactccctcagcctaagacaggaagtttccaatttctctagcctccggatgttccagaatggcatttaggatcrtctgtagtatggccttagtggatctctcactgttccatcacatatgtctcaccttctgggcaaactggacccattgccattttctaaatgtactcatgttgtctgcagtcttacttttgttcttcctctttgcctaaaatatccacccattcacctcccwatgttgaagttggaccatttgctaatttaatatatatatactggggttgactctatgcaagaaactaatcatatttgtagttttagagaaatatattcataaaatattttctttttcatctagttggatgtgaaccctatctgctttaaactaccttagctgtgaaccctatctgcttttaactaccttagaatattttacatcttagaaaatagtttctttgcctacatgttgtactagtcaactgtgtgcttgtctcttacctcctagtagactaagtgtattgcaagcaagagctgcgccttagttattgtaatactggtacagcctgtctcagctcctggtccctaygtggtacttaagaatctgtcagattgaatggagttcataggttcctagactccactaaccaaaggtgtttgcttctgactccttaggaattctatctatactgacagaaaaggtttcccaggcagcacccaataaaccttttcctgcaaaatgggcttgcttttgaacacgcctcatccagagtcaaagagagacatggctggagaccctagttctactcttacccactcattcccaagatggtctgaaagcaaatgtgaaaaagagaaatgcgttgacttaattaaactgacaatattgttgttgacttttcttaagcaaatactgtcaaaaacaaattgaaagcgcagttgtttcaagtaattttcaaaatgcaaacattttacttgaaatattgttaactaaactgtctaatttgactgaaagttcctgccattactttagatggtacaaaggttgatggttgatgcccttcgtccaccccaccccctcctttttcaggtgctttcagtctaaagatcaaataaagtatgcacatcacgttaagaaagtttgatgcacctgtgtttagagggcatcttcattcttccagctcagatacttgtgccccattgccccttttccagttgtttttttgaaatgaatgatttagggggaaaaaaaaaagcaattcaaaagggtaaaggcagaagaaaaaggccggatggcttctcgtatctttttctttgtgcttttgatgtcagtcttttattgctttttacataagtggaatgagaatttagacaagaaaaagatgagtaaaacctttctgacaaggactgtcttagctatttgatagctrtaagactgtgggaacctaagttggataccaatccatcacattacagtaatcaacattggcttagttttttgtgtcatacattttaccttgtcaagagaaaagtgataaagaaaaagaggcaattaatgactaaacctgtaataggtaatagtaataggaacactttacttgctgtcagaggcaacatctaacctctgctgatgagcttacgtgaaatcactttctgacctctgtagtctatttatttctcattaaaaatttttttacaggcaaagataagattaaagtgtctgaggatgacctggagaawctccttctaattmaatggtgtgttttggaaaccattcgtttaaaagctcctggtgtcattactagaaaagtggtgaagcctgtggaaattttggtaagctttggtttggttttaaatgaatcaaccttctacaaaaaaagtacacattttgcccacatatatttttcaggttgacatatcttgatttatttttacttgacaaataaatattttatatatttgtcttgtacaacatgtggttttgaaatatgtatacattatggaatggctaaatcaaactaattaaaatatgcatcacttcacttgcttatcagttttctgtgtaagaagactaaaaatctattctcttggtaattttcaggaaaacaatatgtcattactaggaatagtcaccatgttatacaatagacctcttgaacttactcctcctgtctaactgaagttttgtatcctttgactaatatctctccaggtcctcctccaccccttctttacccttcaatccccggtaactaccattctactctatttctgagctcactttttttagattcaacatataagtgaaaatacacttatatgtggtttgtcattcttcctggcttgtttcacttaacaaaatgttttctagtttcattcatgttgtcacaaatgagagcatttccttctttttaaaggttaaatagtattccattatgtatatatacattttataaacatgggagtgcagatatgtcttcaacatactgatttcatttcctttagatatgtacccagtagtgggattgctagatcatatagtagttctatttttaattttttgaggaaccttcatactgtttaccatatggctatactaatttacattcccaccgatagtgtgcaagtgttcccttttctctacatcctcttccacaattatctttcatctttatgatatagccattctacaggagcaaggtgatagatccttgtgtttttaatttatattttcttgatgattagtaatgttgagcatttttttatacctgttggccatttgtatgccttcttttgagaaatgtctattcagattccttgccaatttttaaaaatcattttttttgtttttgttttttactagtgagttgtttaagtttcttgtatattttggatattaacctcttgtcagatgtatggcctgcaaaaattttcccccattaggttgtctcttcattctgttgactgtttctttggctatacataagctttttagtttaatgtaatcccatttttctatttttgctttggttacctgtgcttttggattcatattctcaaaaaattgttgcccagatcactgtcatggggtcttttcccatatgttttcttctggtagtttacagtttcaggtcttactttcaagtctttaatctattacagttgatttttgtatatggagtgaaatacaggtctaatttcattcttataaatgtggatgtccagttttcccaacatcatttattgaagaaactgtccattttctattgtatgttcttggaacctttgttgacattcaattgactgtaaatgtgtgtatttattctggggctgtctattctgttctattgatctatgtgcctggttttatgccagtaccatgctgttttgattactgtagctttataatatattttgaagtcaaatagtgtgatgattcaggttttttctttgttcaagggtcttttgtagtttcatatgttttttctatttctgtaaaaatgtcattagaattttgatagcatatattatgtaatttcttgaattccattgagcacaaaatgaccctagaacaggttattaataagagttgtgtagcaatgtttcattaatatagatatttatcttatggcaagtactttaagtaaaacataataaccctttaataatcattctggccatctgattctgaatcagaatcaatataatcctatttaaatcaggcaggtgaattgaatggtctcttgtctactgattcaaccaacatgaatttcttagcaccaatgagctaaggaattcaggatgtgaagaaagttattttgcatagctggaagacaattttaggccacagattacagatatgggaacagataacaggaatatattggataatctcaatttatattaggaggcagcagctgagtgaaggtgagaggattttctatggacaaagtaggaggaaattctcaagtgcaccatgaaagggtatgtgcacatggcagacttattagttaaatatttgtgaatcaatatggcataacaaattattttttttgaaatgatttgacttagggcctgcattatccaaatggatcacatttaatcagtcctctactattgtttgcttttttatatgcagcttgagagtgcttggattcaaaccaaggaaattttgtaatagaacacagataaaaatccaaattttgtaaaagttgaaacttttgcttccaaaggagacatgatttatttaactgaccttatgtaaattagagtatttagtttttgtgggatttcaacagttcatacttttatttatttttattttattttaatttttttgagacagggtctctgtcaccaaggctggagtgcagtgacacaatctcagctcactacaacctacaagtagctcttccacggtcttttaacctcatgtattagtcaggattatgttataaagggagttgtaacttttgttggggctattaacctcccatattctttcaaaagtaattttacttattttgacaactttgccagaagagatacccatgctcaaacacatgcacacagatgtatactcttgcatgcacaataccccatctgcacaacctcttaaatgtactaccgcaactatctaatattctctttgtatgacattaatatagaaaccaaagtttcagcatagtgtaaatctgtcattaaaatttttttaacactaattcttcactttttatgcatctagagagttttcacatttatttcagtggtcacataatagtccattttcttgaaagcataaatatttagtagtttttgactcttcagaatttagattgttttactttgtggttatgttaatgtggtaattatttgcatctctgttgcccatgctggagtgcagtgacatgatcttggctcactgcaaccaccacctcccaggttcaagcaattctcctgcctcagcctcccaagtagctgagattacaggagtgtgccatcatgcccagttgatttttgtatttttagtaaagccaggatttcaccatgttggccagactggtctggaactcctgacctcaggtgatctgcccgccttggcctcccaaagtgctgggattacaggcataaacgaccacgcccagctgaaaagttttctgttttaataaaacacatctacacaattttgaattggtagcaaagtcatctaatatatggatatagtatacatttttaaactagtccctgttcttgcatatgtatgtggcttccaatttttcacttctataaacagtgtgaagatgaacatccttttagctaaatccttgtatacattactaattatttccttagtataaattcatacaatttggttctttcaagattcatatgttttcaaaaacaggtggaatgtttttgctgaactgaagtttaacgatatgttcccagaaatttgtattttaaaacacatttcacatgggcttatctatgttgagtaatgacagargctcatattttctcctctgttgggcaactggtcaatgttcctttttakgcatactagaagtattctcccaccacccttccctaaggtagttcgaacaggctctctttgtttgcttttgcctctgtgccctttcctggaaatggaatgaattgaaatggacgaacactctctactttcttggatttactgcattctwtctttctctttattatgctacctttctaaaactctgaaacttctacctgtgttctcttttcaaggttttatatgtttagtagaaaagtttatcttcaagaatatccagaaaagagtaacaaaaaagagtattggaaaagatgagtaattgagaaatattaattatcctttaaaacctgttataaagccaaaagaattaaaatgttatgatcccggtgtcagaccagatgttcagatcaatagaaataactggaaagataacaaagaattagcttccttatacataataatttaatgtaggataagtgactcttttaataaatcaatgtaaagggaagaaattaatatgtggcttgggatgactgactaaaagtgggttttttttaaacttcttaagtagaagttctcaaactttttggtttcatgatcccatcacactcttcagaattattgaagatcccaaagagtttttgtctatgtctattttaaatctatcaatattagctatattttaaatttaaactgagaaattgttaaaatattaatttggtgattcatttaaaataacaaaaacctcttacatgctaacatgatacatagttttctaaaacattaactatatttattttataaaaagaagaggactgcctgattttaagattaatcaatgaagccacaaaaaggataaacagatttgaatgtaccatagcaaaatttaatgtctcattttttaaragtgtaactcaaatgtgaatataatgtaaacatcaatatacaacacaactataaataattttaatatttaaagaactgacacaaatcaataagaatgagtgtcacataggttaatcaggacagaacataaaagtttataggataaaataaatggaaaaactctcaaacataaaaatgtaaatgtaaaaacataaaaatgtaaacctaaaacaaccattagaaatgttagattacagataaaagggtaatgaaacttacattctcataaattatagttagaaatatattttgctacaaaatttgaggaaacagttgaataacatgcatttatagccttaaaatatgcatgtcctgtgtcatctgaacatctgtgttaacagaatctatgtggaaaaatgctgtgtggaagaaagtgcttatggtggcactatttaccacaggaaaaaaagtagggaatgattacattaattattgtttaatgtacccaatggaagattaaacagtcattggaggaagaaatattcaccatgaatatacaataaaaagggaaaacaggttatgaagttaagagaactaagaaagattaaattggttattcaggaggatcaaaactatgtttaaagtttaacaacaacaaaatatctcctattaatactaagtaaacatactggaaagaaatctagctagttaatgactgtctttgggtgtcagaactctggattttcttttctagtttttctgcttttcagaattttccaaactttttgtagagataagtttttatcatacaaaagaatatactctttaatttaaaaaatacttattttgtttttattttttttcggcacaaacaccaaccaagcctctggttgaaagctaggagaaaaggctgtgtgctttagacctcctgctatagatgtgttgcctctggactcctcctttctctttaagattatgtattcctggcacccacttagctctgagcacctttcttgaattacaacacagagtcctgccttctcttccttttttaaagaaagccccacttctagattatcagatgaagcttgttttggcttcacaccatccaggtgaggtgggctggccaggctcaattctgtctacctgagagatgcagttcttgcaacacacagaagttgtagcttccctttgctagtgatctgtgttctcattctgcaactgttttgcctccctcttgatctttcacttcatctgtcatgtaagtaaagatagggactgtttaggctgggcgtgatgatgtctgcttgctcagagggtttcttgacagaaccagctccagcattcattccttcatgctatttatcagtctggcagttgctgctgctgcarcaggcacctctttcttgtctcctccctgttgctagtggtaattctgttactgaggacctgtatgaagttctcctccctttgctaacctgctttataggctacaacagtcagcagcctccaagtcatgatcacaggtcaacagcaacttaagaggactttgcggtgggaaggggaagggctgtggttgtcctgactgaaggcccatccctgtgctgcccccaaccctgctctcaaatacacatcacggccctctgtggctgattccagagtcagtaatgacctctctagcctcagttccaatggaagtaaaacagacaggattgggatctcacaggtctctctattttaaaatgatagaaggtacctgcaaaagcttcactgtcttcccagtcttggatttgagtctctccagctctcccagttctgaaattgccaaatctcaagcaatactcagctgccactagagccaacaggggttctcctgggttaaaaaaatgatgacatccctacccatactccactcatagctaccagtaaaagacatatttttatttttcttcgagacagaatgtcactctgtctcccaggctagagtacagtggcacaatcatagctcactgtaccctcaacctcctgggctcaagcaatcctcctgtctcaaccacccaagtagctgagactacaggtgcaccatcatccccagctaatatttttcatttttttgtagagacaaggtcttcctatgttgcctaggctggtctcaaactcctgagctcaaaggatcctccgaccaaggcctcccaaagtgctaggattacaggcatgagccaccacacccagcagaagacatgtttttaattgtaaggtgtttatgctttggataagtaaacctaaagtaaaagtttttcaaatatcttgaggacatttcaaaattatacacggttaaatagatgtggcttatgatgatgggcagtgggaattacctaataaaatatctctaccttagtaaagttggtagctatctagcaattataaaacttgggagatctctttgtcctgtgattcctgaacatggtgatgatagggagattttgtgaaatgggttttagttctttgtatagtttatagatcatgaaaatctgttgtcatatgaatcaggaaggataatgtagactacctgaggaaacacattgtttatcctcatttccacaagcactgtgaccccaaacacaaacccaaccaaacaaatacacaacacttgccttttcctgtgtcttcctaaccagtcgtttttcatttgtttctttcctaataaccggtgctggactgaggaaagaaaagtccactgcccctgctctaacactgtcattagtatccacaagaacaggacatcctctgcccctcttctcagtgctaccatggccrttgtccctgtctcagagtccaatttttctgtttcataacctgagcctccactgtagtttctgccttcaagaactctggccacaaaccctaatatcaaacatcaaaaggtacattagaagggacttatactagtttctaaaattttgacatttagctaatatttccttccatataactgaatatatgtacatgtgaatcagaattatataatttcctctatgtaaccaaatatatgtatatggaaatcagaattatatagatactatattattagattttatattatttataattagatattatataattatatagatattaaaaattagattttctcacattcaattataaaaggtatatcttcaccacaatataattgtagcatcatttttagtggcccaaattctctttaaagtatatttcaaaaaaatgatttgcagctgatttttctgttatagaattacatcattccttctggtgacttgttgatgttgtctccattttggctgcatagaaatccaaagtattttcctgagcctgaattgttcaaacctgtaagttatctctttcagtatatattattctttcattttaatttctttttatttcagaagggtaaattcagaaattaattaggactatataattaagcagccatatttctctcgtaactaagaacaaagttgactacaaagtacagaacagatttgcaatatagatagtgcaacatttacaaatcagttagaaaagtttttgtagtaaacttctctaactttaaaatacattttacatgaaaccagaagggcatgttcaagtgaataagcctgtttttgatagaagacttatttcatgttcttcaggcaattgcttctgtcattggtttccaaggagtacaaaaaaatacaaataaagcaaattaaaacygtgatctgctgtttcttagaactggaaagttacagggccgaacagaatgttaagaggtcatttagtctgttctctgcctttaggtaaaactgtcaaaaatggcatccagatgcattcattctgcatcccaagctttttctaacaggcagggatgtcagtgtcttactactaaatttattaccaagagcaattttatgacggagcctgagaccttattataaatattcttcctcttcttaggtcaattctgtggttgatttaccttatcatttacatttaccacttaacagaattttttaaaaacctttttatttataagttcatgttccagaaacacaattgtgtctaatattaataacagggtggaaaaaattaccaacaaccctgcaactttatatgcaaggattagctgtacaaggtcatttttagcctagagaaataaagttaagcttatttatataaggctgatttggaaaaaaaaatgttttcttcccacaggaacgttggaaaaaggcaaatttagagaagcactctttcttggactgcttcatggcatttggaagcgggaagttccagtgtyctgcaaggtcagtgagacagctgggccacayttatccagaaagtctgcagaaagatgatggctcagaggggaacaactttggcttaatctctttatatatatatttaaactatagggaaatccagaagaacacattttgtctggtttatctgtggtcctgtgcagtgtctctctgggaatatctaaagtggcttctgatagaagaccttatgagaagagaacattacacttgccagatgccacatcaaagcagcgtttatggttcaaattgtcagctttcacacaaacataattggaagtggtttgagtgctaccttctttaaaaacaaagatagaattatatttctttcactatgacattgtcatggatatttgctagggttctagaaaatctttggcttggagcatagcaggcacttactaggtggtttttgtctatggtgttagtttggcttgtgaaaactttcttttgataccttttatagttaaattaatctggcacccagccctcctcctcagtgtgataccctgttctaatgcaagtgtccattgtttaatgaaagttattgttatctttatttgttcaagcagaaaaggtttttgaacatctcatctgtgccaggccctcttctaagcttcagagagcactgaggaagaccaacatggtccctgacttcatagaatttacaatctacattaaatatgtcacatttcttcattggggatgattctgtaggggaaatgtcagtaccwgtttatgacaaaatctcactcaataaatgtagaaatccattaaatttttatatttaaaaaattgtagtttcttgaagtcagtcctcttcattatttgaacaataatgccagtccatatttgcagttattaattgctccgcagtatccattccatccttccgttcttcatgtgtttagagtattagtatgattttggtaatttacgcttcccctaaaatagtattaatcagtcatagccaatcatggaaattctatcctcattttaggcattattctagaaatctaagcctaagcaaatgggtgcctggtgttttgatgagctgcttgtcctgaggtaggaagttgagctaaactggccaaacagagtgaaaggagagacttcttcaggatgaggccccgttcatcctgtcccaytggatatgaacaaggaagcatgcagcctcagatgttactagcagcaagttcaagaggaataagctgtatgatggtgcagtctgtagatggcagagcagaaatatagtaggagcctgaatccctggaatctcagtaatattattttgtcgctgaattcatcagatttgaggagcttgtctacttcctgttatgttagataataagtgtccttactttttaagtcacttttagttgagggttccattgtttggagctgaatacccaccatatactgacatacccaccataaaactccaaagctgaacattataattgagtatcagttactttagggacatcatataacacacaacaacattagcaacaaaaacccatcatgctcatcctgcctctcatattattttcactttagagaagcagttcttaagccaataacaaattttttgtttttgtcacataccaaatgtcaatgtcctaagaatagttcttctaaaaacaatagatgctacttttttcaggtttctttatatcactatatctagctatctgtctgtctatctatctatctatctatctatctatctatctataccaatagcaactaaataatttattgtaatcatccttgacctggagctagcagtattttaaaccaatgactgaaatgtcttgcaatgaagtgtgtagtatgggccaatggtcaaggattacctgttgactattgtttccaagaggcgctattactaccttccatgatgacatttgaggctaacagacatttttttgagtttgaaagtaattggtataataaagggaaccatgatgctgtaactcaatcaatagtatcttctttagacagaaactacgtatttttagagcacgctgagctcttactctgtgcaaggcagtgctctggctaccataggggctttgagcatgagtaagayatgtttcaacccacatgagaaacaacttagtaggggcaaagtggacattcaattaataaayaactgcaaggatttctggtcgagagatgccaaagcgtcacactgagcttcaagagaaaggatatgtctggtcaagatgctctcagaagatttcctggggaaagtggcgggagaccttttagcttgagacaacagaatgagcaaagggttactaagcacagaggcatgtggcttaaggccttatggttttactgttactgggaccagattacagtggtgagaagtaaggctgaaaatgtacactggcccaattgaaaaggccccttaatacctgatgtatgagtttgtatgcagctcacatggcactaataaagaactaaaagrttttgggcagagtggattcatgtgaagcatgacttaggttatatggttatgctaatattctatgtgtgagacakggagtggtagaatctaccagatttggaagatgattagaagcgggggtcaggtgagaggaaggctttgaggtggactgtggctttaaatccaggtgtctggtagaggtggtggaaatacagaaatcaggaatgagagakagtctgggagcaagatctgaagttttcctttgaaagtagagtgtgtcaaaatatatatatcacttaaccaaaatctaccagttaaatataaatgttgaatacatgtgacctatttaagaaacctcatcaagtttagttttctactgtttctgttttaaaatgtccttaattttgtcttattacttattacttattttaaacagccaatgcatgaaatgttttgtttctaaagagaaataaaatagcaamttgttcaggaaagcaaatgacttcatttggacaatgtataccaaggtagattttttttgcactagaaatttaatcccacaaatccttagttgtaatccccagaaaattgcactcrttcttgatttgtgttccaggcgccaatttattttctcatgcaccaaatactcagtgagtcagagaaagttgcctgtaatatggctgatgatcaaagttcatcatgaacacacactcttatggccttgcagctgtcacttcttggagttcaagccactgaggtggtatgagaacccctctcacaagcaaacacagaaggttctgctgatttaagtcagtatgtactcggtgctgccatgggataacaaccaaaaatcagaatggaagaactgtggttcctcttcgtattcgtgggggttctgaaagtaggtttggagcaggatcccactgcgaggcacttccttgtagcacatggaagaaaatctttctagtaattctactactggagaagtctggtgatttatttctgttttgttttgtttcagaaaaacaaacaggaaagagcagcatgaaccaccagacttcttcagaaattgtagcttgcaaagtgaagagtctcattatagcagacagtctcacattaaactatacgatttaaatggaggaataagacggagggttttcagtgtggaggaaaacttctttgagtgagcacctctgagagttgatgatcttagggatgtgcttgctatacctgtcccctggaacacacaccaaaaccaacaagcttgattttccttggttctaattcctgcaagaggatgcctgatttgctgtgtcattgtgcaaattgatatggcttaaactccagtgtaaaacaacagccctgatctttggcaagattaatctgcttataaaggcatgcttggataagaagagagtgtaataagaggaaggctgcaatacttgagaagttaaaatgaagcatggattcctcaggaatagaaagtgtgatttttactttttgtgtatgtttgggtctttcatgtattctagggagtcctaggccacaaagtcatgggcttgtcttgagttcctaatgaaaatctcacatctattggaaaattaattaaaatcagaggtccatctaatagtaatttagtagtactgtttttaaccaaacatctcttgagcatctagtattaatacaattattcttttatttgataactatttactgagtgtgtgctatgtgtcaggttagggttctgggagttatcatggaaaacaaatcagatgaagcccctttcctttaggatgttatattcccacccaagtcaccttgttaaaaactgggaagagtcaaagactcataacatttctgaattggttataatgtggttggggaaatgagacatagccatatgaaaaaaaaaagccctacttaacagcttaagatggcacatgacaaatgccagaagactcagatatgtaacaactgccataagaatttggaggaagggggattagaaaaggcttttggactagattagaataatcagtaaacaacataaaagaaaggtcagcttcctaagatgcagcagtatcaaacttcaagggaagaaaaaaaattaagtgcttataggaatataatatacctatatgttagtgatagcaaggcgatgatatatttgggacttatgatgctctgagcacatctttttctatatatttatgttaaagataatgccattttaaaagctgtgccttatatagtaaagtatctgcacactcttgtatttgagaagtgttattagtagctttctcccttttatacttagaaatagctgattgcttttaaggagtgagcaaatttaaatccccataratttartgacaagttaaaaatccaatttattctgaggaatttgttccataaacaaatgcatcccctcaactctagttgttaaatataattaaaggaattgtatttacttgtataattgtttcctaacattttcacaagagtgtgcacatatcctggagagtatataaaagagggttaggaatgagggtgggaaaggtgaatgtggctaattytgagactctgagccaggttatcagaatccttattgatttttagccatgcttctctcttctcactgctttgcaaaggagcaatgagtcactcaaaggagcatagaaaccattggcaaaattgcagtcattattttcctggccatttcattttgatacttcattatgaagctaagacataagtatgtcaagaacagaagaacagaaacagcaattcaagagtgrtctttttttctttttcaacttttattttgggttcaagrggggtacatgtgcaagtttgttgcatgggtagattgagtgtctcaggagtttgatatacaaatgatttgtcaaccaggtagtaagcacagtgcctcacccccctcccatgctccacccacaacaattccctctttgtgtccatgtgtatttaatgtttagctcccacttgtaagtgagaacatgctgtatttggttttctgttcctgtattaattcatttaggataatgatcttcagctgtatccatgttgctgcaaaggacaggatttcattctttttatagctgcacaggatttcatggtgttactatgtaccatactttctttttcttttctctgtctctctctttttttttttttttctgagacaggccctgttgcccaggctaaagtgcactggcgtgatcatagctcactgtagcttcaacctcctgtgctcaagcatcctcctgcctcagcctcctgagtcactgggcctacaggcacatgccatagtgcccagctaattttaaaaaaaattttagtagagacaaggtctcactatgtttcataggctagtcttgaactcctgagctcaagcaattctcccaccttggcctcctaaagtgctgagattacaggcatgagccactgcacctggccccacattattttaaatccagtccactgttartgggcatctaggttgatttcatgtctttgctattgtgaatagtgttgcaatgaacctatgaatgaatgtgtatttttggtataatcatttatattcctttgggtataatgggattgctgggttgaatggtagttctaagttctttgagaaatctccgaactgctttttatagtgaccgaactattttacattctcatcagcaatgtataagcattcccttttctcctcaacctcaccaacgtctgttattttttgactttttaatgataaccgttctgaatgatgtgagacgttatctcattgtggttttcatttgcatttctctaacgattggtaatgttgaacagttttttatatacttgtttcccatgtgtatttctttttttgagaaatgtctgttcatattatttgcccattttttttaaatggggttgtgttttgcttgctgatttaagttccttacagattctggatattagacctttgtgagatgcatatgccaaatattttctcccattctgtagattgtctgtttactccgttgacagtttctcttactgtgcagaagcttttcagtttaattaggtcccacctgtctakttttgtttttattgcaatggcttttggagactttatcatgaaatccttggcaaggcctatgtccagaatggtagttccttgattttcttttacagccattaaagttttaggtcttacatttaagtcttcaattcatcttgagttgatttttgtatacrgtgaaaggaaggggtccagtttcartcttctgcatatggctagctagtttatcccagcaccatttattgaacagggtatcttttccccattgcttgtttttattgcttacttatccgatctgatgtttttaagtgtgcagctttattcctggattctctaatttgttccattggtccatatgtctgtttttgtaccagtatcatgctgtttgggttactgtggccttgtagtatagttttaagtcaggtaatgtgatgtgtctagctttgtccttttgcttaggattattttggtaatttgggctcttttttggttccatatggattttagaatagttttttccaattctgtggaaaatgactttggtagtttgataggaatagcattgaatatttaaattccttgtgcagtatgaccgttttaacaatattgattcttcctatctatgagcatggaacactttctccatttgtttgtgtcatatctgatttctttccttggtgttttttaattcttattttaaatatattttacctccctggttagctgtgttcctaggtattttatgtgkgtggctgttgtgaatgggagtgcattcttgatttggctctcagcttgggtgttgttggtgtatagaaataccactgatttttacacattgattttgtattctgaaactttactgaagttatttatcagttttaggagatttgggacagacagtagggttttctaggtatagaatcatatcgtttgtgaagagagatagtttgatttattctcttcctatttggatgccttttatttctttctcttgcctgattactctggcttggacttctagtactaggttgaattggagtatgagagttgggcattcttgtcttctttcggttttcaaggggaagggttccgatttttgcccattcagcatgatgtcagttatgagtttattgtagatggctctcattattttgaggtatgttcctcctatgcctagtttgttgagggtttttaacatgaaggaatgtggaattttatcgaaggccttttctgcatctattgagatgatcatgtattttttgtttttagtttagtttatgagatgaatcacattgattgatttgtttatattgaaccaatcttgtatccaaggtaaataaagtaaacaaagtaagttttatttactctaaagtagactttattcctgggatacaaagtatggtkgattagctttttggtatatggctgaaatcaatttgctagtattttgttgagaattgttgcatgtatgttattcagcaatattggcttgaagttttcttttttcattgtctctgccagattttggtatcagagtgatgctgtcctcatagaatgagttagggaggagtccttcctccttgacttttttgaataatttcagtaccaataatttcaagattggtaccagctcttctttatgtatctggtagaattcagctgtgcatccttctattccagggcttttttggttgttagattataatataataacgagttttgattccatttcagaactcattattggtctgttcaggatttcagtttcttcctggtaaaatcttcgaaagctgcatgtttccaggaacttattcatttattctaggtttccaagtttgtgtgcatagatgtgttcataatactctctgagggttttttaaattatttctgtgggattggttgtaatatcccctttgtcatttctgattgtgtttatttggatcttttctctttttttttctttattaatctatctagctggtggtctatgaatcttagttattctttcaaaaaacaaagttttggttttcttaatcttttgtatggatttktgcgtctcgatttttgcatctcagttttggtcaactccagttttggtcatttattttcttctgttagctttggggttggtttgtgcttggttttctagttcccataggtgatattagattgttaatttgagatctttctaacttcttgttgtaggcatttggtkctgtaaactttcctcttaccactgatttagctgtgtctcagagattctggtatattgtatatttgttttcattcatttccaagtatttgtttttatttctgccttaatttcattctttaaagtcattcaggagcagagcaattaatttctatctaattttatggttttgagagatgttcttggtattaatttctatttttattgcactgtggtctgagagtgtggttggtatggttttggttttttgaatttgttgagtattgcttttatgacccagcatgtggtcaatcttagagtatgtgccatgtgcatatgaggataatgtatattctgttgttgggtagagtattctgtagatgtctgtttggtccatttggtcaagtgttgaatttaggttctgaatatatttgttagattttctgctttgatgacttgtctgacactgtcagtgtgttgttaaagtctcccactattattgtgtggtatgtaagtatcaatataagcctctaagaatttttttttatgaatctgggtgcttcagcattagattcatgcatatttaggaaagttaactcttcttgttgaatttaaccctttatcattaggtaacacccttctttgtcytttttgagcattgttggtttaaagtctcttctgtttgaagtaagaataacaacccctactctttttttattttctgtttgcttgatagatctttctctatccccttaccttgagtctttgggtgtcattgcatgtgaaatgggcctcttgaagacagaatacagttgggtcttgtttctttatccagcttgccactctgtgccttttaaatgaggttcttagcctgtttatattcaaggttaatatcagtatgtgaagatttgatcttgtcaccgtgttgttcactggttcttaagtagacttgattgtgtagttgctttatagtgtcagtgggctatgtacttaagtgtgtttttgtggcggcagataatgatctttgatttctgtttggtagtcccttaaggacctcttgtaaggcaggtctagtggtaatgaattctgttcacattttcttgtctgaaaaggattttatttctcctttgcttatgaatcttagttttgttggctatgaagtccttggttagaatttctctgctttaaggatgctaaatatacacccccaatctctcatggcatgtaaggtttctgctgaaagtttcattgttagcctgatggcaattcctttatacatgatctgccccttctccattgctggctctaagattttttcttttgcattgactttggagaatcttatgagcatgtcaacctctctagtgaagttgaggaaatctttgtggacaatatcctgaaatatgttttccaagttgcttgttctctctccatctttttcaggaatgccaataagttgtaggtttggtttcttaacataatcccatatttctaaaagactttgttcatttttataaattattttttctttattgttgtctgcctgcgttgatttgaaggagctgtcttcaagccctgagattctttcctcaacttggtttactctgttatcagtgcttccagttgcattctgaaattcctgtggcgaatttctcatttccagaaattcagtttggttctttgttaaaatggctatcacatctttcaactcttggaccatttcactgttttccttggattgggtttcaaccttctcctatatcttgatgagcttccttgccatccagattctgaattctatatctgtcatttcagatatttcaggctggttgagaactatagctggggagctaatgtggtagtttggaggttaaaaaatgctctggctttcagagttgccagaattcttgcactggttccttctcatctgtgtgagctgatgttcttttaatcttttggatgggactttttgcttcttatattctttgatacctgatatggtttggatctacatccccacccaaatctcatattgaattggaatccttcgttttggaggcgggtcctggtgggaggtgattggataatggagatgttttccacgaatgatttagtaccatccctcttggctctgtcctcataatactgactgagttgttgtgagatctggttgtttaaaagtgtgtagcacatcccccatctctttcttgctcctgttcctgccacgtaagaagcttgctccccctttgccttccatcatgattggaagcttcctgaagttcggccatatccaccccatcagaatcagaagccactatgtttcctgaacagccagctgaaccatgagccaattaaaccttttttcttcataaattacagtctcaggtatttctttatatcaacgtgagaatggactaatacaatgcccttgaggatttggctgtggtataagttggatttagttgactggcttcatatctggatattttcagaggcccaaggctcagctcatcactcctggactgggtgttctaacccaggagggctgggagcaggcccacagctttgttctggggccccttgagattaaagcacgggctgtgctggagcgtttgaggtgtttccagtctgttggcaacaacacttgactggagcttctggcaaaagtgctctggcagggcagtggtgggcccctgtgtgcatgtattccagtgaggtggggacagggggatgctatgagtgagtgcacatcaatgtgggaaggctgcaggtgggtgcacactggcaagatgcaaaagtgctccaatgggtatgcagcatctgccagtgaaacaactcgtggtggccattgacaagcactttggctgggcaattgaggctgggctgcatgtggttgcagccaggcagggaccctgagagaggccagcagactggggtgtgctcaaatcagactgcatggacaagacaaccccactctctccaggtccagcagctaacaaaggctaaagtcacctaaaggagtatggtgagccttgtgggatgagtgtccatggccatgctccactatagacattcccatgtcaaaccctctgggctctttccaggctggaattctgtttccaccaactctccaggcaattatcactagcagctcaaatgtcatgggagttrtgggatctcccatagctaggatctcagaagcccctggtgaaggtgagccactccatgcctatttcacttaccctttctttaggrggctcttgggcccagaaatgagtcctggtgctcggcaaccccctgcagtgttcccaactttctctactttcagcctatggtctgtgtcctttttgtgtccactctccatgccttctttccaaagacttgttcagagtatgctggtctccttgatagtctagtctctttcagtgggagaatttcttcctrgctgtatctagttggccatcttggctccctaaaaaaattaacagtgatttttgatacttagaccaaagtgattctaaaacaaactgtgtttatttctgagcaaaaatttcaggatgacacccttttcctttatttacaaaatagatctccagcccccatcctgtgcacagaatacctgggcaggatatgtatctatggagagaaagaaaggccacttagggttggatatcccttttttctcccatggactttctcatctcatcttaactgaatgactgctctttaataagttaggtrtctctaatgttcaaaagaaatttcattcctaagaaaaggggactagaattaaaactgctattttacaatattgkccataggttattatctcytcatcacctaattccttctcctcgctttctaatagttttaattttcacttggatatccatggggattctgaagcactgattccactcccagctctgtagagatggaacacttccctaagacaatcagcacatgatgtccctgccccctctctcctttacgatagtgattagtttaggtattggcagatgttttaagcaggaaaattaactactagggtttctattgagacctctgggtcaaaaataatcattccttccaggatcttcataaagacacatttgaccccagaaactggtgcagctattttgagactagaaaagcagacaatattatgctgaagctgataacataaaacagagcagtagaaggaaactgactccatggcaacatcactgagctgctggaatgatctcttcctgaagccagcatgagccacaggtttttcatatacataaagcaatgcatttccttcaatatagaaatcagtctgatgtgtgttttctgttccttgcaaccaaaagtatcctcagtaatgtaattcccttaaaagcaagagttttctttcaagaattattgaactccatgaaatcttgtattagcacttcctaatcatgtaagttaattgctttctaaataacctgtgcttttttaaagggcttagcttcatttactttggttatatcagttaagactgtcaaatgcctgtctcagacactgatgacacccactgctatagaattatggccctgttctccaggtgccatagatgttctatacactcctgagcccaggactctggctctgatgttgctctgatcacctatgtgctgaatactgggaccaccactgccacaaaaatgcctgtgccctggaaccagtgctactgtggttaccagcatgcccttgtgacagactcagcaccaagaggatccctttggctaggactccccacagtgtcataggmggccccaggaaaaagaatagcaggaggacyacagcaatctttgacactaaggccctctaaaactttcatcactactgctgccttcaaatacatctacaaccttggccactgaggacccccacagtcctgtcaaatattgattacagctgatggaactgcacagactatgccaccacatcctgttcacttagcatagcactcacccacaaatgaaagtatttccccacaaatccagcccatcagtcttgaagagatgactgctacctcaaatgcacagatatcattgcaaggtcataaacacatacacaaaggaaaaatgacatcaccaaaggaccactataattttccaatgygaaaccctaaagagttagagatctgtaagcttcctaaacaaggaattaaaaataattattttagagaagctcagcaagatacaagagaactcaataatatcaatcataacaacaatatatgaataaaactggaagtgaagcaaagagattgaaagatcaaaagaaagcaaacataaatcctggagctgaaaaatacagtgaatcaactgaaaaaatgcaatagggaacttcaacagcagactcaaccaagcagaagaaagaatctctgagattgaagataggtcttttgaaattatccagactaaggagaaaaaaattgaaaagagtaaagtaaacctatgggacttaagggacactaataatgaaaccaatgtatgcatcataaaagtctcagaaggaggattgagaaaggggaagaaaccttatttaaataaattatggctcaaattttcccgaaccctgagagagatatggacatttacacctgtgaaactcaaatgtctccaaacatgttcgacccaaagagaacttcaccatgacaccttataatcaaattgccaaaagtcaaagacaaagaaatttaaaagcagcaagagaaaagtgacttgtcacatacaagagaacctttataaaactattttggacttttcaggagaaacttcacaggccagaaaagaatgggatgatatattcaaactactgaaagaaaaaacattctgaaaaccaatgatatatctggcaaagctgtccttcaaaaatgaaggtgagataaagatatttccagacaaacagagctgaaggagttcatcactactatacctgccttataagaaatgctaaaggtacttcttcaagcttaaatgaaaggacacaaattaataacataaaaatgcatgaaagtataaaacccactggtcatggtaaatatatagtcaaaatcagaatattataatccaataatggtgttatataaatatgtttttaactcccgaaaaaaatattaaacacaaaagtattaaaaataactatagctacaatattttgttaagagatagataatataaaaagcagtaaattgtgacatcaaaaacatataatgcatgtgggggtaggagagaagtaaaatgtagagtttccataggcaaatgaagttaaattgagtgcacccttggataggtatgcagtacagtgtagtactggttttattaggttaaaatatattgctataagtatgttttctgtaagactcatagtgaccacaaagctaaaagctatagtagacacacaagagataaagagaaatgaattaaagtataccactacaaaaacgaatcatatcagaaaggaagatagcaagagaggaacaaaagaactaaggaactacaaaacagaaaatttttacaaaatggcaatagtgagttcttacctataattaattactttgcatgtaaatggattgaattatgtagtcaaaagtcacataataactgaattggtaaaaaaaaaaagcaaacaaaaacaatacccagctatatattgcctataaaatgctcccttgaggacacatataggctgaaagtgaaggggatggaaaaagatattccatgtaaatgtaaaccaaaagacagcagagttagctctgattagacaaactakacgttaattcagaaactgtaaaataagacaaagaaggtcattatataatgataaagggataaattcatcaagagggtaaaacaattgtaaatatatgtgtacccaacatcagagcacctgaatatacaaagcaaatattaacagaactgaagggataaataaatatcaatgcaataatagtaagggacttaaataccccactttcaacaatagagagatcatccaagcagaaaatcaataaggaaacatgggacttgaactacattttagaccaaatggacctaacagacatatacagaacatttcatccaacagcagcagcatatacattcttctcaagcacctatgtctagtgctatgacagtcttcaagataggtcatatagtagaccataaaaaatttaagaaagttgaaggcatatcaagtgccctttcttaccacagtgttatgaaactagaaatcaataacaggaggaaaactggaacattcacaaacatatggaaattaaacaacatactactgaatgacaatgggccaaagaagacataatactttgtttacattttgagacaagtaaaaatggaaacatatctgatatggtatggatgtgtgtcctctcaaaatctcatgttgaaatgtgatcttcagtattggaggtggccctattgggaggtgttttgatagtgaggggaaatcccccatgaatggcttggggcctttctatggcaatgaactactgcaatatctgattgttaaaaagagtttggaacctctcccatttctctcttgcattctctctccctgtgttgcatgctggctccccttcaccttcttccatgactgtaagcctcctgaggccctcaccagaagcagatactggcactatgcttcatgtacagcctgcagaaccatgagccaaataagcctcttttctttataaattccctagtctcaagtattccttcatagcaacacaaatgaacgaacacaacaacataccaaagcttacagaatgcatcaaacacagttctaagggggaagtatatagtgataaacacctacattaagaataaagaaagacctcaaataaacaatgtaaatttacacctcaaggaactagataaagaagaacaaatgaagcacaaagttggcagacatatggaaataaagctcaaagcagaaataaatgaaatagagactagaaaaacaatttaaaaagtcaacaaaaaggtttttcagttaaaaaattaagtcttgaaaaatgatatatcttctggtagactgatgaaaagagacagaagacaaataaatcagaagtgaaggaggacaacagataacacataggatcataagagattactatgtgcatttaaataaaaccagttagataacctagaaaaactagattaatttccagaaacataaaacctaccaagactgaattataaagaaatagaaaatcttaacagaccaacaagtaaggagattgaatcacaaattaaaagtctcctatcaaagaaaagcccatgaactgtttcccttctgaattttactgaacatttaaagaattaatacaaattcttttccaactcttagaaaaaattgaagagagaacacttccaaacccattttacaaagcattaccctgacacaaaagtcagacaaggaaactacaagaaaagaaaactacaggtcyatattcctgatgaacataaatgcaaagcttctacaaaaaaaaatactagcacctgtattcaacagcaaattaaaaggatcatacaccatgatcaagtagtatttatcccttggatgcaagggtggtccaacctatgcaaatgaagaatgtcatataccacattaacaaaaggaaaagcaaaaattatatgattatatcaatggatgcagaaagagcatttgaaaaaatttatcatcttttcatgataaaaaactgtcaacaaatcgagtatagaaggaaagtacttcaacataataaaggccatatatgacaagcccacagctaacatcatactcaatggttaaagattagaaacttttctctatgaccaggaacaagacaaggatgccacttctgctacttgtatttgacatagtactggaagttgtagccagagcaattaggcaaaaaaagaaataaaagaaatccaaattggaaaggaagaagtaaaattatgactcttcacagatgatatgatcttatatgtacaatccactgcccccaaaacactgttagaactaataaataactcaacaaagtagcaggatacagtatgaacacacaaaaaatccattgcatttttatatactaactgaacaatctgacaaggaaactatgaaagcaatcccatttataatagcataaaaatgaataaaacaattaggaattagctaaaccaagaaggtgaaagagttatacactgaaaactataaaacattgctgatagaaattaaggacatagataaatagatacatatcccatgtttctggattggaagactaataatgttaaagatgccagtgctacccaaagaagtctgcagattcaatgtaatcgcaatgatgttattttttttttggcagaaatagaaaagcctattctgaaatttatataaaatttcaaggaccccaagtagccaaaacaatcttgaaagagaagaacaaaatggaggactctcattttctgattgcaaaacttactacaaagctgcagtaattaaaacagtgtgctgttgacataaagatagacatgtagaccaatacaatagaatagagagcccagaaatagaccctggaatatgtggtcaaatgatttttgacmaagatactaagaccattccatgggaaaggagcagtcttttcaatgaatggcgctgggacaactaaatatttacatgcaaaagaatgaagttggactcttataacctaataccatacaccaaaattaactcaaaataaaataaatacttaaaactataaaaatcttagaagaaaaacagagcacaagctttatgacattggatttggcattaatttttggatatgacaccaaaggcacaaacaacaaatgaaaaatagacaaaattggactttatgaaaatttaaaaattttgtgcatcaaaagacagtatcaacaaaacaaaaaggcaacacacagaatgggataaaatatttgcaaattacatatctgataagggtattagtttccattatgcatagagaacttctaaaactcaacaacaaaataacccaattcagaaatgagcaaagaacttaaatagacatttctccagagaacatacacaaatggacagtaagcacatgaaaagatgctcaacatcactaatcattagggaaatgcaaatcaaaactccattgaaataccaccttatacctgtgaaagttgattatacaaaatgaagtcatttatgtcatacccaactaaaatgagtcaagaagccatgagaaaaacactaaggttacatacacctgttttttttttaaaaaaaaatgtcttataagctcaatccagatctgcatggacctaaccataatttcaagactgcaagtcccacctggcaactgctgaaactcacctatcagagctcactagctcttgtaagatgctgccagcaccagtgaactttctctcaaaacaatttgtttaaccttcccttgccccagtaaaccttaaccatttctttgttctgtgagcataacagaggccaccctagtctgtgtgtgtgccctgaattgcagttctattccttatatattccaaacaaaacctcttgcttagagattcatctctatatatttttgagttggcatatccattagaatgactaccgtaaacaaagaaaataacaagtgttggtgaggatgtggagaaattggaacctttgtgcattattggtgggaatgtaaaatggaacagctgctatggaaaacggtatggcagttcttcaagcatttaaaaaaaattgccatatgatccagcaattccacttctggatatatatccaaaggaaacaaaatcagtatctcaaaagaagtatttgccctcctaggctcattgcagcattaatcacaatagccaaaatattaaaacaaccaaagtgttgattgataaatggataaaaaagttatatatatatmyatggaatatttttcagccttacaaaaggaaatcttgccatttgcaacaacttgagtcaacctggaagacattatactaagtgaaatcagctacacacagaaagacaaatcctacataaagtcatctatatgtgtaatctaaaaatttgaactcattgaaacagtgagtagaatggtggttaccaggggttgggggattggagatatcaggcagagagtacaagctttcagttacaagattaataagttctggagacctaatgtacagtatggtcactataattaataataatgtattgtacaattgacagttgctaagagaacagatcttaaattttctcacccccccacttctcccaaacacacaaaagggtaaccacatgaggtgacggatatgttaattaggttgactgtggtaatcatttcacaatgtgtgtgtatgtgtatatatgggtacatgtatatatgtgtgcatatatgtatgtgtgtgtatatatatatatataatcatctcattttgtgctttaaatatatatataattcttatttatttatattttgaggtcaatcttayctcaatgagctataaataaaataarccataagatcatttctattttgcaagtacttaaacttaattaagtcagtactattcctttgccccttttccttaataagaagctgatatagttaggctttgtgtccccacccaaatctcattgtgaattgtaatctgtataatccccataatccccatgtgtcaagggagagaccaggtggatataattgaatcacaggagtggtttcccccatgctgttctcatgatagtgagtgagttctcacgagatctgatggtttttataaaggactattccccctttgctcacacttctccttcctgccgccttgtgaagaaggtgccttccttccccttcaccttctaccatgattgtaagtgtcctgaggcttccctagccatgctgaactatgagtcaattgagcctctttcctttatagattgtccagtcttgggcagtcctttatagcagtataaaaatgsaccaatacagaatgtttaaaaagagatagccaaactattagctcatagctcatttgtatggaaattttatttctaggaggagtaaccataggatcaccattagaacaatcctgkctgcagtcaggaaaacaatagctccagagcatgcactcctagtaacagccacttataatcttcctaatgaaacagaaaacagtatgtcaaatcgagaagggctgaggttctccagttcttcattcttgctstcccatctgctcttgtgactgagcatcagtgagtttgctgtcagatgtgcatagaggccaataccatggcactggcttttgagaaaagaaaacttttatttcaagtcaactggcaaggatacaggaggaaatgctcaaatctgtctccccaagctggaggctggggtaggtttcataagcatagggtaatgatgtgtgatctgattggatcttaacaatgaggtgatgtcgggaagcatgatctgactggatcctgccatgggtgatgacagtgctctatctgattggatcctggatcctgcaatgtggtgtatgctgcttaattcagtccctgctccttggtccaagcacttaatccctctgtggttgcacagttggttatctgggcatgccctggttacatgaccttcatcctgggggtccatggcaaatgaaaagcaactcacaacattgttacataaacgtctacaccagattcgtttgatgtgtttacactttctcatctcctttttttattttatttatttcccattttcttcttttttttatgttttcttcttttccttctcattcagcttacccttatccctttcttctcttcccattttgttcttttttttctatatttaatataaaacatctaccttcccactctaccagattatgctttcaccagtattcccaatcaaaagtttggtaccccagacataatgttgcatgtataatggagatattctttataattttaatgttgtgtgctaaaattaaaaggtttrgcaaactgcatcttctaacatatttttttttcatcattttccttgacaagttcctctagatcagtattctcaaaatgtggtccccagaccaccagtattaagattaccaggaaacttgtaataaatgcaagttcctgggccctgtcccagatctcccgactcagaaactttgggggtggggcccagcaatctgttttaacaagccctccagatgattctgatgcactaaaatttgagaatcacaggtgctagattattttgcctcctgctaccatattgattttattttcctaaaagatttctcagagggatgaggttgccatacttccgctttaacttgatagctgcgcttcaatgaatgatgcctatgacactatgtctgtatgctaccttctctgaattccggggcaagatcattctattttcataagctgcagctggtggcaactaggaatatacttcagacctcttgctcctggcaacagtgatagctttccagcacatgctggcattacctacaatgacttctaggaggaaaaaagagagaggtgttctctttaaaagtgacagaggtattcagtctcaaaatcaagacatctaaaattaaaatcatcaattttccccaatactagcattccttcagtactctctctccttctatcactgctctcttagacacctgggtttttggagttatcctttactcctccttccttctggccttctgtgtacattctccactcctttaaaactaggtctcctcagccaggtccagtggctcacacctgtaatcccagcattttgggaggttgagatgggcggatcacttgaggttaggagtttgcgaccagcctgaccaayatggtgaaacctcgtctctaytaaaaatacraaaaaattacttgggtgtaatggtgggtgcctataatcccagctacttgggaggctgaggcaggagagaatagcttgaacccctgaggcagagattgcagtgagccgagatcacaccactgcacttcagcctgggcaacagagsgagactctgtctyaaaataaaataaaataaaataaaataraataaaataraataaaataraataaaataraataaaatagaatagaataaaatagaataaaatagaataaaataaaaaaaatacaaaataaaaaacaaactaggtctccttcacctcagcatcagatgactattatcattgcctaacccttctccctgactgtattatctcttatttcaatccatcttactcactacatacagatgagttttccttaaataataatctgattgtcactctctcattgagattctggtgccactacctgctgrccaaactcattagcctagaactccgggccctccataatctgacaccagccttacctttctaaacatctgagaatgtcctccccagagcgtctacttgctgttccttactacagagtgtccactcctccccttgcccatgttttctgctggctctggaatgctstcactcaacaagtctacttatttaaaggttcttttgccctcatggtgtagctcaagtttcacctccatataaagtcagtgttaatcatgccaggttgtagagtgctctccagactccaaattttgtttcccttgtttctaccttcatctatatattattgtgacctcttccatctctccatgtgcattgctagcattgtgttgtgtcggtcttggtgttctcaatgcctgtgtagcattccttaatgaagtatttaaatacaaatgcagaaaatacgcaagtaccaagtatttaaaaaattttcaacatgtttctattttaatgagctttattagtagatgtgtaatgttgttcttgtaagtgtaaaagataaatctgtcataaacaatgtgcctcattattttcactgttttgacattagaagtattaagaaaacattacttacctgaacatagcttagcttgcttctgaagagcttctgtaaaaatacgaatttacaaggcccgttttctttgacataaaaagctttctatgtcctaggtatgtatatgtcagtttctggtattttacacattgaacaaaattcagtgacatagtaaaggctttaaaaaacagtatttttttttttttttgccactgtaaagaaaaaaactttagtggtgaattgaggtaattctattagaatatccaaatatttggatttgaagaaaattcaacttttcctttaagatatcaaaatcttaatgtaatataaatatcaatactatcttaatagctagttattaatttaataactaaactaacactaaaaagtagaaaagaaaaatattaagccacacaaattcaaaatgtacattatgaattggccaaaagcctgagtatttatctttaagggaaatgtagttttatcatttttaagaacatcacatagactaaaattaattagggaaattctgccttatagattgtaacagaaaattgttttaatacattggtaaatattatttctaatctttttttgaaattttttattattcattctgttcctcattctactttctctacagattttttctaacatatttttcagcttcaaacttttaaaaatttatttatttatttgtttattttatttattttttaatggagaggaggtttcaccatgttgtccagactggtctccaactcctgagctcaagtgatccacctgcttcagcctcccaaagcactgggattataggcatgagccaccatgcctggcctttaaaatgtatttactttaaatgacaagtaaaaattatgatgtactatatgatgctttgaatatgtacatgttgtaaaatggccaagttaagctgtttaagataggcattatgtcacatacttttttttttgaggtgagaacacttaaaatctactctcttagtctggacacagtggctcatgcctataatcccagcactttgggaggccaaggtgggtggatcacctgaggtcaggagttcaagaccagcctggccaacatggtgaaacaccatctgtactaaaaatacaaaagttagccagttgtggtggcaggtgcctgtaatcccagctactcaggaggctgagggaggagaatcacttgaacccaggaggcggaggttgcagtgagccaagatcgtaccactgcactccagcttgggcaacagagtgagactgtctcaaaaaacaaacaaacaaacaaactactctcttagcaactttcatattgttattaactgtagccaccatgatatacaatcagtatattgaacttattcctcctgtctaactgaaatgtgtcccttgaataacatttccccaactcccctaaccccagcctttggtaaccactatttctaattatttctaatcaaaatatgcacggtatttctaaaatgtttaatattgtgctcttaacttatgaacgttgatcttgtttgcatttctcatttgcttagcaaattattttagggatccaggaagtatttattgaatacctcctatatgttgtaataaagcttcgagaaaccccgtttccacacctagatataattgttcaatcagcacaatctattgaggggcactttcgttattaaagtcccaacactgtcacatggcacattcaaaccccccttgaaccggctcctcctgcactgtccagcttcatctctcatcacctcaccttctgcatggagtcaacaacttgcaggtccctagatactatttttcttctaagtctgtcccttggaatggattttctctctrccaagtgtaccttcttcacttgcgcagctcccatactgcaccctcaaattgttgactgtctttttcgcttgttgcagtgcctctagggacttgagaggaagagtggcaggggccttttatcccaggatgctgaactcagagaagttggaaatcactgcactggtcaatagcaagcttatattagagaagggcttaaaacaatgataaggagataggatttatttgaataaagcaaggaacctacaaaactgttctataattcacaaatacaaaattagccagcattttttctagagctgccaagtaaatattgaatgctaggaagtcactacttcctaatattctaccaaacatgaaatgccaacttagttatttgaaaaagtgagctcatttaatttacttgtaggaagagagctaagtactgaaaagaagtggttactttatgtaagtgggagcttgatgtctaatttcacatattggtgctttttgccttctttccatttgataggctggctcacaccttccatgaaacactttatttatggggttgcagacacaccaccttcctttattattctaccttttggcctgcttctttcccatctcctttgctcatcttcctcaatttcctgacttccaaattttggattaycccagggctccttccgtagattttttttaatcaagtttatttaactcactctgtaagtgatctcatactgccccatggctttaaataattgtctaaataatgatgactcttatatttataaatcttctatctctgaccctgaatgaatccttcctaatcatggggctcattacttagcttccattcaacatcttctttggatatctaaaaggcactggtctatagagagctgtacttaagtccaaaactgagctccagattacaattccctcaacctcctcttccttcaatcttccccatttctgaggtaaacaacagctgtatccttgcatttcctcaagtcgaaaactttggagtcatccttgattcctttatattcttcacatgtataatgtaaaccatcagtccatcctacagaatatatccagactctaactatggcttacaactatttctaccatcctgttctaagtcaccactttctattgtctggaaaattgtagtggctttcttatcactcttttcgcttccattcatctcaccctatattttattctcagtgtagcaactgaaggatcctttcagagcttgtcatacttctcaaaactgtccagtagcttcccatctcaatactagccttctcatcatttctcattcttctaactctggatttttgcaccttttatggctcaccctcttattttattctagggtctgataaaatgtcacctcatcagagagaccttccttctctaaaatattttagcccacacctccatcaactttctttcctgttcttatttattattctagaatgcattctactagaatttaagcttyatgagaacatgaatattgtttttgtttactggggtgacttcagtgcttagaagtatataaagcacataaggacacaataaacatcgaatgaatgaatgaatgaatgggggtcttattttattgttagaactcttagtgtataatctaagtgtcgctttactgttcccataaaagtcactttttttcaaaggagaagagagaaaagacaggtgtgttacattcacaacctagttatccatttaaatttgacccttggtgttctgcagtctttgctgagctcccagctcctccacgtgctaccacccacagcactgaaaatgagatgctgcttttttcagatcatctccagcagagggatgaaagtgaggctactcatgcttcctgccattatatcacctctttactttccactgcactatcacacaagatagtgtaaatgtgtcagttcttatggaatttttagggtaagcaaattacagcataggtagggaaatattaaaattgtacataaaatgtttattttcctatagtcctagagaaaagtacttaaattgagcacttcacagaaggttcctttttcctaaccttatatgcctttacatggcaatgtgtttgtctcttttgcaaaatagtcacagagcagctgccctccttttagtctcatccctcctctgagaagctgattttwctccaagatatatcaccacccttcctccctaggtcatttctcagtctgagtatagagtaacatgaggggctttagcaggactgtccatggttgtccttgggacttgagttcctcaaaactgttcattgcgggcacaggcacactatgttccttaagacctgcccaaatattaattcttttaaattttctactgaatgaatggttgattgtcatttcaacatcagtctctttctctcttttacacamttcccaaagaccatcaccttttttttttttttttttttgagatggagtcttgctctgtcaccaggttggagcgcagtggcgcgatctcggctcactgcaccccctgcttcccaggttcaagcaattctcctgcctcagcctcctgagtagctgggattacaggtgcgtgccaccacgcccagctaatttttctatttttagtagagacggggtttcaccatgttggtcaggctggtctcaatctcatgacctagtaatccacccacctcggcctcccaaagtgctgggattataggcatgagccaccgtgcccggccgacaatcaccttttytcctaatgcatgctataatctaaatccttacggagaaaattaaatatttacccccagattacttaggctgatctctctcatggtaaaattagtgcattattagaaagaacagtgatatagtttgcctctgtgtccccacccaaatctcatgttgaattataatctccacatttggaggaggaggggcctggtaggaggtgattgaatcatgggggtgaacttcccccttgatgttcgtgatagtgaatgagttctcacgagatatgatggtgtaaaagtgtgtggcacttccccctttgctcgctttctctctccggccaccatgtgaagaaggagcttgcttccccttcaccttctgccatgattgcaagtttcctgaggcttcccagtcatgcttcctgttaagcctgcagaactgtgagtcaattaaacctctttttttttcataaattcccaagtcttagataagttcttttcacagtgtgagaacagatgaatacaaacagtattagctccctttctttataccttgactgcttattatttttctttctattctttaaacacattgtaagtcctttggcttgcattgtttccagtgaaaagtctatgttaacttttaatgtttgttgttctttatggtgtctttgttttctggctacttaatttttttaatccctgggtttatttattaattgcaatttgattatgattcacattagcatgattttctttttctttttttcyttttttttttttttttttttgagatggagtcttgctgtctcccaggctggaatgcagtggtgcgatctcagctcattgcaaactctgcctccggagttcaagcaattctctgcctcagcctccgcagtagctgggattacaggcacccaccaccacacctggctaatttttgtatttttagtagagatgggatttcaccatcttggccaggctggtcttgaactcctgacttcatgatctgccctcctcggcctcccaaaatactgggattacaagtgtgagccactgtgccttgcttttttttttttttaaagacagagttctgctctgttgcccaggctggagtgtagtggcacaatcttggctccgtgcaacctcctcctccctggttcaagctattctcttgcctcagcctcccaagtagctgggattacaggcacacaccaccgtgcccagctaatatttttgtatttttattagagacgaggtttggctatgttggccaagctggtctcaaactcctggcctcaggtcatctacctgcctcagccttccaaagtgctgagattacaggcatgaaccactgcacccagtcggcatgattttctttatatttcttctgcttgggggtcttgatctgtaaattatagttttcaaaaaaatttgaaaatgtttcactattacttctcaaaatattttccctgcttgstcatctatatctctaataacatgtatgttagacttcgttattttataagttaataacctatttatttttataggcttttattctgtgtacttcattttagatatttttctttgttatgttaattaaattccattatcttttctttggcagcattttaccatctgttaatcccatccagtttatttttcatttaagatattgtatttttcattgctagaagcacaattatttttaaaatatcttatctttctctcctcatcatgctgttcttttctacctttatgaacctgtggagtataataactatttttaatatctgtcatttctgggcctatattttttcaatgggctttctcttggattgaggtcatttttctgttttgttttttctaagcctgttaacttttgaatagatggcaagacgtaaatgttaagtgccatggatactgggttgtgttgtattcttttagtttagacctcattatgacatgcagttagttgcttagaaaaacaactttgcaaaacttgtttttaagcttcagtaaggtaaatccagagcgccatttaatgtaaaataatmtaatcccactactaaggcaatacccatttaagagctctagctaatggtccatgtgctgtacaatggtgagactttttcttgtgtgaacacagcctccatgtcttgtgtgagctcttggccttattcagcttcttgtgctttgatttcccttttgtggttctttttccgtctcagtagttttctctcacacatgcagagatcagtactctgccaaatactcaagtagactcctatctagatccctggaatactcttgtgcgctctctttctgtgaaactccttcttttctgatactcttctctacaaattttagtctctttagcttgcctgaacttggatctctgtctgctgaattaataatactctcagacctgtgagttttttctgtccttgcactgtggcctgaagactgccagaagcaggaaaccgaagcaatcatgggtttcgtctcattctttacttcctctggagatctttgtcctacactggagtttgccccgtttttgagttatttaaggcaggaagataacaccaacttttgttactttatcatggccaggaatggaaattccaatttgtgaaaagtttgacaaaaccttagttgtgagacattctgaacctttatgtgagttagcaaagttgttttttcttagaaacattgctgactttgatccaaatcagtaaatattagccatgtcctatttcatagacatggatacccttttagaataaattatctttagcatttgcaagtaagtagggttaaatttgcatcataaatattactgaataattgatgtgatattcagatggattatagccacacctggagtgctccagatttcatttgaaataaaatacagtcaagatgtttcaagaacagtagtgcagaaaaatctaattatttgatatgaatatgagatcattgatatgtatacattcactcattcaatcaacaaacattgatgatttaaagataagacatagttcctgctttttgtgaaggctgtagtctataagggaagacagacatgcaaattctagctgtaatatagtaagatatagtaggattgtaggataaaggcattagttaagggatatgtaaagtgccacagaaatacagagacaggtggaaagggcaggaaattgaatcttctctatggaaggcatcactttccatcactattcatttattcagttaacattattaggtactaatagtgtgctgtgcactgtgctaaggcctcataatacaaatcctcctctgggagagccctggctaacaagcaatcacaatgtggtgcagtagcagctgtggctaagatgtgaccagggaaccatgtggtggagaggaagggcactacagcctggaggacagttatcaggaaatgcttccagaggagattgagcctcagaaagggaaaggcttgtggcacagagcatcrtcattcagagaatgtcaagtaatataacgtggctagagccacatggtgtcaagggggagctctgggggagaggagactrcagagataggtaaggggcagatcttcaagggctggctgtattctgctgtggtgtttgaaagattgcgtgtgtgtgtgtgtgtgtgtgtgtctgtgtctgcgtgtgtgtgtaatgaggagatagtgaagatatgtgttttagaaagtttactccagtggtagggtaaaggacagagtagagggaagtgaaactggaagccatgtggaaggtaaattgattcagtaatccaggaaataaatgatgaagaactacactgagggagtcatggagggactggagataaggggttaaggaggagaawtaagagctatttaggagaaccayaaaaaaaggacttggtgcctaattggatatggagggtgatggagaggatttagtctatgacaatgttctgtcccgttggactaattgtattcattaagggctatgcttcctaaaaggtttccctatcctgcagagagttcaaaacaacccaatgggacacagggaaaaataacagaattctatttatacttttttcagttttttagtttctatttgtatgtgtcttagaaaatagtctctaaacagtgtagtatatgtgcataatttaaaataaatgagtatcaatatattgtagggcatgctgaaatattttattatcaagartgtgtgatcaaaatgcttgggcactcttagacaaggagtgcaaaaggaaaagtggatttagaggtcctggggaatttgatgttcctgtagaacattcaggcagtaatttccagtgggcaacaggatctagacttaggtaggactgtccaatagagccttctgtgatcatggaaatatcttaaatatacactgtccagtatagtagcctgtaaccacatgcagcttttgagcacttgaaatatggccagtgcaaccgaggaactgaaattttccattttgcttaatcttaaacttatttattaaatgtatttaaattgaaatagccacttgtatctaatggctatgatactggaaagcacagtcctaaagagagagacttgggactgtcatttattgagagctcccactggctcagcactttatatacattttaaagcaatttaatcatcccgctaccctatggagtaggtggtattaagaaagagttaagttcttactctgtcctttaaataggaaaagagtatattgtaaagaagagcatgtttactctgaaatatgtatgctttctagatattctctgttggcagatatttatacatctttcacaatcaagtaacaattttattcdtttcttccaggtggtttgctctgttagaggttcagatgtgtattattttaatactttataaatatgactgtagtcttctggacccattacccaaacaggtaagtgttttcagaattttgagtatcatgactacttataaatatgacataaccacccccacttcccccaattttgattactagagatgagctgacatttcctcacttaggcctgatcttaacaggtgccttagattgaaccagactgagaagatactcggtctbcttaattcaggatctaatctatgtacccaattactacctgactgggacttaatagcagtctttccaccacttccagtgttaggagctctwcattgcacttaccaatttgaacacttttctctgagttaaataaacatggcgcccactttgcccttatttttctagaaaggaatgtctgtgatccaaatgtgaactattgtttttaatgcaagtcataacccttggtccatctgaaaaggaacagcatggaaaaaaactaacctagcagtaaaaacagtgaacagaaatgaaaaggtcatggttttattcctacctcaaactattgaatattcagtcatttaagttttctgtagatctattctcatagatcagtggctctcgaattggtgtgagcatcagcatcactagtagggcttrttagaacagactgtataaaggtgctatttatcgctagaatttctgatccagtaggaacaggggaggggctacagaattgcatttctttccttttttttttttttttttttggttggggggttgttttttatttgtttttgagacagagtctccaaacactgtgagctgagttcagtggcacaatctcagctcactgcagcctccgcctcctgggttcaagtggttctcatgcctcagcctccctggtaactgggcctgcaggcgcacaccaccatgcctggctaattttttgtatttttagtagagatgttgttttgccatgttggccacgctggtctcccaaagtgctgggattacaggcatgagccacagcacctggcccagaatttgcatttctaacaagctccaggtgatgccgctgctgctgctgcttgtctgggtgccacactttgaggacctctgttgtaagaaataaaaggaagttcaatttaaatccaaatgtttggaaatcatgtgaaaactttgggtaaagggtgctatttaaattggggctgaagctcagaaattaaggattgcaatctcagagctattcacatagcgttttgtgctttgatttactcttgatataataaggctaatgtatggagagataaataaaactcttrggtgacatttcaataggaattatgtaagtgcgtaagtgacacagaaagtattttattactcacaaatatgcacatttcagcatttcacttgatttcttttgcacttctattttgaggacgagtaacttatcggtgatgaagagctctcagaatcttacaatgaaagggaactcaaaacaactctcacaaagggtctcagctacctgctatattgttgacaaaatgaacatcagggtcaggctttatggacatcaaatactagttcctgatccactgagttgaatgtcacaattttgctcaaggttaaactcaacatccaaagattttctcaccagcaagaggacaccagaatgccttttcaggtgaaaaggatggcattggttaaaaccatggagattagtaattttgaccaattccttaagacaggatttttcctagcattttctcctaagaattctattatctgtatttaatttcttatactattttatatatgtcctatttatgttttgacaccactgagaacactttttaaagaaatgttctctcaggttataaaaagtacaagtctgagtgaattcccatgatctcaaagagcattttatctcacaattcttattstagaatgagaaacatcaattaactttatttaactattgaacttgtttcaataaattataaaatcaggtgaccagaaagtacaggaaatggccgtcaaatcaccaggctcttctaggagaaggcagggatgggttgtcaaagcatgtcctraacactctgttgtcaggtgcaggggaaatcagtggacttggaaaccaactcccctgaaggaatttacttaacatagtagaaaaaatcaaatgctagaatctccaattttaattttgcaacagcccaatgttttattttacctcaaaaggccttaaataatgtagtgttaattctcttccattatgaatcaaacaaaaaggaaatactacaaagtttaaggatctgtggtcaggcagcagtgtcctgatgctagcagtgagggctgttccattttragcattaaggaaaagtcaactttaattctcttgcaaaagcaagcacatttttgctaacacaatgggtttttatttctttgtatggttgkttttttttttttttcattttacttttggggttcatagaaccttaggaaatctcacaaaatgcatggatcccctttgtagaaaagtgcatacttcttcatacacacaaagttgtggatgcaatttcagtgggttcgtggaaccctgcaacttattctttcaactctccaaagaatctccttgctaaagagcccattttgtgccctatttcattcaaacttgaaaatagactgattctaaattggatccacctcatctttcctcactcctcatcttccctcagccctcatggttgacagaaaatgttccttttcttttttaatcccctaaacctcaaatatctctttgtattatttacaatacgctgacctccccttgaccctacacagtttcatatcttatttctaactcgggcgaaaaaagtcagaayatttggagcctacaaagtatctttatgggggcgatggagtgagactcctctcaaaaaaaatatatctttatggaaagtcacgatcatgaatacgctataagtggctcacatcaccaactccacatcattctttaaacacctgtaacctgcagtatggagatctcactcagcgattctaaatgaagtgtcacagtttttgagccagaattgtagaaagagccttatttgtggtaacctctttagccagataaagcgaagggtggcaggcctatagccttcaggtgtrtacaactaaagagattgttattagaataaggaattgtattctttttcttctgcctgaatggaaggctaaagttgatgttggatattgtgaagttcattgatgcaaacatttcccaacttgaaaaacctaaattttgtactttttagagaagattacaatggaataaaccttaggtctgaaactgtggacttatgtctcttaatttctatttcttctgcatttctgtttttagagttatctccatttggtgggtgtcccccagccggaagggcaatgccgaattgaatataaacaaagaatatgacatctgttgggcctcacaakgaccagggccttctggaggagtggcactaccccacctggcagcacctagacctgagctctacaaaaacacactgcttcactttgttttaggacttagttcaagaacacattcaaatggtgcatgtgtttggtatcttcaacagtagaccaagaatctaacatcactctcagtaatatagagaccggaatacatggtttataggaaatgatcaaatgatccaaaaaaactccacattttttaagaagttggaatttgatttcatgcrtaactgtattaaaacattaaatagaaataatgtcatttgaatgaaaatcttatcacattaaattcactgtgaaggcagcatacttaaatttttattttgaaaagtctaaaaggcttagatttttaaaatttaataattatttctacaaattttctatttttcttgaggtgattctcaactagcaattggaactcctaggctctattaacataattctttattgtaaacgtatctaatgctaaaagtaataaaatggtagttttctgagacctgtgaggacaggaatggtgtcttacattcatttctacactttattatgctcaggattgcaccttctttacagagtatattcaataaatgtatgttgattgatgtattgatttatattttaattaacctggaagcattgttttgactcaaagtgtttgcaattatagtttggcagataccatatttttgctaatgcatagaaacacaaatataacggtatgccaagacaagtaactgtagtggaatctattaaagacttataactgtcaagtatttaccatgaaatccagaaaagaaatcttaccatgttcaggaaaacatatgacactaataacagagtgaacacttatgtcataatttatcttccagtattatataaagtgctgcttgcctctcttatttcacagtgaggaagctttgtgtggtgcatgttgttcttctgtggcttatttgcttccctgggctagaattatcccatgaggttgataatgattgcttagtcatccatttcctactagcaagcacatgactccctaggagaaaattaagtactttgaggtgcattaactcttccagactaatgtagtgattttgaagctgagttagtagctcacagcttagcttacaggctcagggatctggagtcagaaggagctgaagaaagcagttcagaagtccacaacatctctgaaagttgcagactataacttggcaggttctactgaatatggcaggtgcattttgagggaaggtttcttctcccaaacagctaagggtcgcaatgaagcactgtatttgcatacagtatccactttagccaaatttgcagtcactcagagctagtgtttagctgctttttcttgctcagtaaggatgaatgttggctgacaagtttatgcactttaaaaaagaatgcagacacaggagatctgttgacctttgggataatgaatagttaagaggaatatacttggaagtcccatatttcattttgtttccctagcctggggttttatattatatataagtatacattcagcataaattctcatgtgttaactgggattttactgaaagcagagcctgagataggacttgtgtgcagatagcttatttgggatgttcttgcaggtagcataagtgagggatcaggaagagagtaagtcattattaaggttctgtttttgaggtaggtgttagagcatcaagagctcaatttcactgggatcacctgagaataatatataatacttcctagaattgtccatattaaagataagaagtagaagcaattattgactggcttctgtttcccatttattaatgattacctctggggatgttaaccctgcacttccaagctacatttgtttgtggactgagcaaaagtatcaggtggaaagggaaggaagtgaaggcagaagaaggacgataagaagaagcagtaggaggggtaggcatccttgaggctgaaaaggaagtgtagtgggaataaatgagtgagagctgggagggtagaaggtagagaaaaaactgtctcaaattaaaagtttagaggacaaacaggtgggggatgacagtgttaatgatgagcacgtgaggggttgccagagtgggggttagctgaagagaatggaatgatgaatgttttgattatcttttaatatgaaagtgagatcacctatatgcagaacattgtcgtggagatagccattttggcacttgtgatagtagaagttgaccttccttttccttatacaaaggaaataaattggcatagattataatttaatttatactttacatactgaaacaaaataatttatgtatttactgacagaactgcagaggtaaatggtggtgcaattgaacatttgtaattaaagcaagaaattagggaggaaggccattaaaacttaaagtaggaagttccctgccaaaacataagtgtaagcattaagtcagagtttgcactcatttatagggaagtcattttaagattttattgactgactgattaattgattgagacagggtctctgctctgttgcccaggctggagtgtagtggtgccatcagggctcactgcagcctcaacttcctggacttaagtgatcctccagcctcagtaaccctccctccccctgtccactcccagtagctgggactataggcacatgccaacatgcatggctattttttttcccattctttttgtagagacagggcctctcaccatatttcccaggcgagtctcaaactcctatatgaagtgatcctcccacgtcagtcttccaaagtgttggggatataggcatgagcaagattttaatatggaaaaaaaaagagaagtaatcacccatggctgcttaacatttttttttaatttttaatttttgtgggtacatagtaggtgtatatatttatgggttacatgagatgttttgatacaggcaggcaatgcataatactcacattatggagaatgtggtatccatcccccttacgcatttatcctttatgttacaaacaatccaattatactcatagttatttttaaatgtacgagtaaattattattgagtatagtcaccctgttgtactatccaatagtaagtcttatttattctttctaattttgtgtgtgtgtgtgtgtgtgtgtttacttattaaccattcccacctcctacccaccccaccctctgccaccatactcttcttcccggcctctggtaaccgtccttctactttctatctccatgcgttcaattgctttgattttcagatcccacaaataagtgagaacatgtgatgtttatctttctgtgcctggcttatttcacttaacataatgatctccagtttcatctatgttgttgcaaatgacagggtctcattgtttttatggctgaatagtattctgttgtgtatatgtaccacattttcgactattgcaaacagtgctgcaacaaacatgggagtgcagataatctctttgatattttgatttcctttcttttgggtgtatattcagcagtggaattgctggatcatatggtagctcaatttttagttttctgaggaatctccaaactgttctccatagtggttgttctaatttacgttcctaccaaccatgtatgagggtttccctttaccccacctcctcgccagcattgcctgtcttttggataaaagccattttaactgtggtgaggtgatttctcattgtagtttcaatttgcatttctctgatgatcagtgatgttgggcactaattcatgtgcctgttttgacatttgtatgtcttcttttgagaaatgtctattcaaatcttttgcccattttttgacaggattattagatttttctcctatggaggtgaactccttatatattctgattattaatcccttgccagatgggtagtttgcaaatatttttccccattctttctgtgggttgtctcttaacttggttgattgtttcctttgctgtgcagaatctttttaacttgatgtaatcctatttgtccattttttctttggttgcctgtgcttgtggggtattactcaataaatttttgcccagaacaatgttctggagattttcccccaatgtctctttgtagcagtttcatagtttgaggtcttaaagtctttaattcattttgatttgattttttatatggtgagagatggtagtctagtttcattcttctgcgtgtggatatccagttttcccagcaccatttattgaagatatttttttttcccaatgtatgttcctggcacctttgtcaaaaatgagttcactgtaggtgtgtggatttgtttctggtttccctgttctgttccacctgtctatgtgtttcttttttatgccagtaccatgctgttttggtcactatagctctgtagtataatttgaagtcaggtaatatggttcctctagttttgatctttttttttgcttaggatagctttggctattctgggccttttgaagtccatatattataaattttaggatttttttttctatttctgtgaagattgtcattggtattttaatagggattgcattgaatctgtagattgctttgggtagtatggccattttaacaatattgattcttccaatccctgaacaaggaatatctttccaatttttgatgtccacttcaatttccttcatcagtatgtcatggttttcattatagtgatcttttgcttctgtagttaattcctaggtatttaattttatgtatggctattgtaaatggaattacttttaaaatttcttttccagtttattcactgttgacatatagaaatgctactgattttttatgtcggttttgtatcttgaaacgttatttaatttgtttatcagttcaaatagttttttatgaagtctaagtttttccaaatataagatcgtatcatctgcaaaaaaaggataatttgacttcttcctttccattttggattccctttatttctttcacctgtctaattgctctagctaggacttccagtactccatgttgaataacagtggtgaaagtggtcatccttttcatattccagattttggaagaagggctttcagcttttccccattcagtatgatactagctgtggatctgtcatatatgccttttattatgttgagttatgttttttctttgtttgtttktttttgagacagagtgttgcactgtcacccaggctgaagtgcaatggcacgatcttggctcaccgcaaccttcacctcccaggttcaagtgattctcctgccctagcctcccgagtagctgggattacaggcgctcaccaccacgcttggctaattttttgtatttttagtagagacgaggtttcactatgttggccaggctagtctcgaatgcctgacctcataatccacctgcctggcctcccagagtgctgggattacaggtgtgagccgctgtgccccactgaggtatggtttttctatatccagttttttgagggtttttttttttaatcatgaagggatgttgaactttatcaaatgctttttcagcatcagttgaaatgatcatatggtttttgtccttcattctgttgatatgatttatcacattgattgctttgcatacgttgaaccatccttgcatcccaaagataaatcccacttgttcgtgatgaataatcttttaactgaattgttaaatctgacttgttagtattttgatgaatatttttgcatcactattcagcagagatattggcctgtagttttcttttattgttgtgtctatgtctctttttggtatcagggtaatactggcctcatataatgagtttggatggattccctcctcctctatttttcaaaatgtttgagtagggttggtattagctctttaaatgtttgctagaattcataagtgaaatcagcaggtctcaggcttttctttactgggagacgttttataacaatttctatctcatttcttgttatgttcaggtttttggtttggtctgttcaggttttagatttcttcttggttcagtcttggtaggttgtatgtgtctagaaatttgttcatttattctagattttcccatttattagcatatagttgctcatagtagccactaatgaccctttgaatttctgcaggatctgttgtaatgtctcctttttcatttctgatttttttatttgtatcttctttttttcttagtatggctaaaagtttgtcagtttcatttaacttttcaaaacaacaactttttgtttcattgatcttttgtattgtttcttcatttcaatttcatttatttctgctctgatctttattatttcttttcttctactgattttgggtttggtttgctcttgctcttgtagttctttaagatgcatcattaggttgtttatttgaagtttttcttttttttatgtaggcatttatagctatatacttcccttttaatactgctttttctgtatcccataggtttgggtatgttgtgtttccattgtttccattatcatttgtttcaagaaatttttggtttcct

SEQ ID NO: 94237 - DNA, 34561 bp, Homo sapiens
ggcgacagagtgagatctccgtctcaaaaaaacaaaaaaacagaaagaaaaaagtgtccagctggcttcattgcagaaattgacaaactgatcctaaagtgaaataaacctaaagggacccaaaatagtcaaaacaatcttgaaaatgaataagaaagttggagaactcatacttctcactttctttctttttttttaatttgagacaaggtctcactctgctgcccaggcgggagtgcagtggcacaatcacagctcactgcagcctcaacctctggggctcaggcaatcttcccacctcagcctcccaagtagctgggactacatgcctacaccaccatgcctagctaatgttttggtattttttagagatggggtttcaccgtgttgcccaagctggtctcgaactcctgggctcaggtgatctgcctgccttggcctcccaaagtgctgggatctcactttcaaacttaatacaaaactgcagtaatcaagacagtgtagttctggcataaggatagacatatagatcaacagaatagaactgagaggccaaaaataaaccctaacatatacagttaatcaatttttttttttttttttttagatggagtctcgctctgtcacccaggctggagtgcagtgatgtgatctcggctcactgcaagctccgcctcccaggttcacgccattctcctgcctcagcctcccgagtagctgggactacaggcacctgccaccacgcctggctaatttttttttttttttttttgtatttttagtagagatagtgtttcaccatattagccaggatggtctcaatctcctgaccttgtgatctgcccgcctgggcctcccaaagtgctgggattacaggcatgaaccactgcacccagcccagttaatcaatttttaacaagggtgtcagatgattcactgggggaaaaacagtattttcaacaaatggtgctgtaacaactagatccaccagcaaaataataaatttggagccctacctcacaccatatacaaaacttaaaatggatcaaagttctaaatagaaaagctaaagtcataaaacttttagaagaaaacataggtataaattttgggttagatggttcttagatatgacacaaattacaagcaataaattaaaaaatagtgataatttactctgacctactgtaaagaaaagcaataatttcaaagctactgccagatcttttgggtcactgaaaagtatccaccagcagtagatggtcccattggtcctgttgtttcaaatgctctagctagcatagtctgaaatccagagaatgaataataggaaaactgattctctcagcacaatcctgtacagtccaattctgtttcttgtttgttttttgagacggagtctcactctgtcgcccaggctggagtgcagtggcacaatctcagctcactgcaacctccacctcttgggttcaagtgattctcctgcctcagcttctcaagtagctgggactacgggcacataccaccatgcctggctaatttttttttttgtagttttagtagagacgggtttcaccattctggccaggctggtcttgaactcctctcctcgtgatccacatgccttggcctcccaaagtgctgggattaaaggcataaaccaccatgcccaacccattctgttaagagtaggaaaatcagtgtagatttatctgcacttagggaaatgtttgtcttcccttacctgaatttgcattgtcccagcactgaaaaatgtttgtccttggagagtgtgtgtgcgcttggttcagtaagttaccagaaaactataagaagaatgaagatgaacattttctttgcatactgttgtagagacttgagggacctagacttgaggtgccaaatgggaccgttttcctgaaccacctcctacggaaaaaatcagatttattatgttttgcataattgtgtcttatgaattgctctgctggtgaaaggtagagttggggtttggagtgttgtggggtgggctgtggatgccagagggagaccaatccctgtgggtaggcattacagttttcctgcaagggaatgggactttttttttttttaatggggagggattaaagaaagcccattcactgaggagcagcagagaggtaaacttcagacaggacaactgctctgtgtctatgaagggaacctgaaaccgcctttgcaaaattatgactgagacaatgaaagagatttaacttaaccaactccatcttgcttatttttttatttttatttttattgagacagagtctcactgtgttgcccaggctggagtgcagtggtgctatctcggctcactgcaacctctgcctcccaggttcaagtgattctcctgcctcagcctcctcagtagctggtattacaggcgcccaccaccacgcccagctaatttttgtatttttagaagagatggggtttccccatgttggccaggctggtttcaaactcctgacctcaaatgatccacccacctcggcctcccaaaatgttgagattacaggtgtgagccaccatgcccagccagactccatcttgcttctaacctccaagctgtctttgttcattcctgggtgtaggctgaacgaactttgggagaaactaacttagtttgtagtttatagtttaaacaaagacagtaacagccctttctcaaaacaggcctccttcttgcctgggaactatactaacattagccacaggattaaaaattatgacttaggagtcatgcagctggaggctgtaagattctgaccctccctaaactgctcttaagatcagtgtttgagatattttgcagaccctgcacttgatggatcagctggcaccaccgactaataaactggcttatctgatgttgtggcctccactcaggaactgactgaaggcaggaagacagcttcaactccctgtgatttcacccctgaccaatcaccacacctggctcactggctaccccccaactcccacccaccaagttatccttaaaaactctgctctccraatgctcagggagactgatttgagtaataaaactccagtctcccacacagctggctctgcgtgaattactttattgcaactcccctgccttgatgaattggctctgtctaggcagcaggcaaggtgaaccccttgggtggttacattaggacttaaaataataaattattaagaaccctagagagtcatttttttaaatggattatatctatcaaaacttacagtattacaaattaaaataaatgaaaatgtttattgaaaataattatttacataaataatgtcatttcatgaatatagctatattttcttttttttttttttcgagacggtgtcttgctctgtcactcaggctggagtgcagtggcacaatctcggctcactgcaacctccaccttgcgagttcaagcgattctcctgcctcagcctcctgagtagctgggattacaggcacgcgccaccatgcctggctaatttttgtatttttagtagagatggtgtttcaccatgttggtcaggctggtctcaaactcctgaacttgtgatctacccaccagggcctcccaaagtggtgggattacaggagtaagccaccgcacccggcctatagctatattttcaaaaataaaatattagtgagaagaatggcatagttttagatttttgtaaatctcttttacacctggcttaatagaagactgttgggttcttttttcttttttaattttttatttccatagggttttaagaaatgtggtatttggttacatgagtaagttctttagtggtgatttgtgagattttggtgcaaccatcgccgagtagtatacactgaacccaatttgtaatcttttatccctcacccccttccaccctttccctgagtccccatagtccattgtgtcattcttatgcctttgcatcctcatagcttagctctcacttaggagtgagaacatatgatgttttgttttccattcctgagttacttcacttagaataatagtcttcaatcccatccaggttgctgaaaatgccattcattcattcctttttgtgaccacgtagcattccattccatatataaatatataaatatatatttatatatatcacagtttctttcttttttttttttttttttttgagacagagttttgctcttgttgcccaggctggagtacagtgacgcaatctcggctcactgcaacctttgcctcccaggttcaagtgattctcctgcctcagcctcccgagtagctgggattaaaggcgtctgccaccacgtccggctaatattttgtatttttagtagagacgaggtttcatcatgttggtgaggctggtctcgaactcttgacctcaggtgatcctcccgcctcggcctcccaaagtgcagggattacaggcgtgagccaccgcgactggacggaagaaacggtgaaacttttaaggtggtagaattataggatctgatgactgattagatgaagcatggagagggcaacagtgtgcacagtgatgccttttcttcacaggcattataggagggacaggttggtaggaggaggcaacgggtttagttttggatttactgaccggggatgagtgttagctctctaggtagaggtgttccgcaggcaactggtgttgcgggacaaatcatagacgggagagaccgagcagagttcaggagagcctttattattaaggtgatcaccggctcagtcggactagggtccagaaagtctgagccccgaacaaagggatcaatcaccttttaagcagtttgtgttgggagttacgtgttgcatgaagtgtacttgcagaagcaagaacaaaggcagtaaattactcttacatttgttacaccatatgtcttacgtccttgggaatacatgcttttgtaacacttgctaatcagttttgtgactttacagcagcgctagggagggaagcaagaactcgctgtgcctcaaggaatgtgaaacgatggaacacagataagcctctccacgcataggggagaaataagcagttaatatactcttaacccaggccttgggtaggggaggtgctatattacattctacctcaaaggaaaagaatatacttcttgattagtatacttataaaattcattaatttccctttcactggatattcctactaattcccccagggccttgcagttttgtctcattcgctgctctatcccctagcttagcacaaaacctagttcttaacattgattaaataaatgaatccggtcaggtgctcccgtgggtgatctggaaggagttaaatttggtagtcatgggagacgcttctgtgaagccataggagcgaagattgattgtggcggcaggactgaactcagcttctgaatctttctagccgctaaacctacagactaagtggcgtccttggggaatgctgcctcaaacggctcgcgacgtcctaaaacatgtacatttattttggaaaatctgttttcgtaaaacctagcatacttaatcaccaacatttgttaacttcatggtggcatattaatacctgtcaggttgattttagttggagtgggacggggctgacctcaccgtcctacccttcggtatgaggccggcgtcttcacgacctcgcttttcacaaccccagtccccgagggcttatttggggctgtcggagtccccaagacgtggccccggagaagggtgaggtgccacagttcgaggtgccccagtaccctgcgtccggacagggggcggtgctcacgcccaaggccccgctgacgcgatgtaggccgagatcacctcaggcgctcgcggtgcaatcacagagcgcgccgtcrccgctcgagctcgccctgagatccctccgctcagcgccttcaacgccgtgtcccggcaccccgcacccgggcacacaaaaaacgggtcgcccgcgattctcagggattgatcgcctcttcaggtaagttatcttccggccccgtaccactgtgccacaggcgcagcccgcttcctcaggtgccctatcccgcgcaagaagaccacggcttcacagagtgttatttaaggggcgtggccagcggaacatcccgccccattctgtgacgcacggggtggcgcgcgtgggacccgaggggtggggctgggtttagtaggagacctggggcaaggccccctgtggacgaccatctgccagcttctctcgttccgtcgattgggaggagcggtggcgacctcggccttcagtgtttccgacggagtgaatggcggcggcggctgggatgctgctgctgggcttgctgcaggcgggtgggtcggygctgggccaggcgatggagaaggtgacaggcggcaacctcttgtccatgctgctgatcgcctgcgccttcaccctcagcctggtctacctgatccgtctggccgccggccacctggtccagctgcccgcaggggtggtacgtacattctttagggtctgagtggggcgcgcgccgcagctgaggcggccgaagggctggcgtgggcggctccgtggccccgaccggctcagtggatggcaagggcgggggcgactgcggccatgcttggcgtggctttggtggcaggcgcgctgggggctggagtagtggctgcggcggcggcactgctgctggtggcgctggctgtagcacccgccattgccttgtgttggggggcggtgctggcctccccggctgtgtatctgatcctagacggggtcgtggttgcggcatttgtggttgtagcggtctgtactgaccgcagcagtggtgcccctagtggcggtggctggattggcggctgtgggtttgaacgaccsggtggtcgttggggcccttggtgggggtcctgacggagatgctgttggcagctggcccgtcatcctggaggctgccctgtgtggttcagtgttctgtgggctgtagcagtgcccctaatggtggtttatacccatattaaggaggatgtgtagagtgtggtaatggtagtgactggagtgtggtaagggccttcctctgatgctaataatgtaacagtttctcggccgggagcagtggctcacgcctgtaatcccagcacttcgggaggccgaagcgggcggatcacctgaggtcaggagttccagaccagcctgaacaacatggagaaaccccatctctactaaaatacaacaaaacaaaacaaaaattagctggatgtggtggcacacgcctgtagtcccagctgcttgggaagctgaggcccgagaatcacttgaacctaggaggcggaggttgcagtaaaccgagattgckccactggactccagtctgggcgacagaatgagactccgtctcaaaaaaaaaaaaaatcattttcttcaatttaacagccttattaacctagctttcratctcccaaatgttatttgattgtgccttttacagtcagcaataagtagcttttgaaaactacccttttactgacaatgcaatgtacaaacttttgaccaagtagcttttaaaataatttttgtttgaaccataccaggcataagaaagagttatttatttatttatttttttcctacacatgggatctttaaggaaatgatatttgtctctgggaagacaaagttacttttagtgtttaaagatagttctattagctgaggtgtactgtgaggttgtggtgctcctttctatttgagaccaccagagaattgaggagtattaccctttttcattattttgtttgattttcaggatacttaatgttgtaatctgcaggtctcatttygtggcatctaaagaaacttytatgaagaatgctagagttcttgctagagctgatctactctcttaaaaactctaaaatcagtggctctagttcacttgcagtgagagaagcatgagattgattgtttactgagaagtaaatatagcttcttaaacatttcccttctttctatactacaagttactgcttgtctttttctataccttctttaagcaagtatctgggactaaaattgtgagtagtagtagtagtaagtagtgaagaaacaatatagtgggccctctggggacacgaattccacatttgggaattcagccaagtgtagatctaaaatacccaggggaaaaaaacccaatacaaaataacacaacaataaaaaataatacaaataaaaaaacacagtttaataacagtttatatagcctttacattgtattgggtattgtaagtaatatagaaatggtttaaggtatatgagaggatgtgcataggttatacgcaaatacyttgccattttatataagggayttgaggatccctggatacaaatctgtgagggggtcctgggaccagttctccacaaatgccaagggacaagtgtagtttgacctttttggttttttgctactaatggttagaaaagttgcctggagacaccaataataattggacatattctggacagtgtccatcatttaaatttacagtgccttagtgtttatctggtcgtttatcttataccgtgttttgagtttctgttcttttctacaatagctactctcttgaggtatttgcaatttggctgttctcaagttacttctgatgcttccttttttttggtaacttttttttgaagtcttaatagctattttgtttaattgtttggtcatgaaacgaaactgggtttctctcttgaaatgaaacacgaattgaatttactatttttttctcttgtagaaaagtcctccatacattttctccccaattccattccttgggcatgccatagcatttgggaaaagtccaattgaatttctagaaaatgcatatgagaaggtaagtcttccaaataattagaggaaaaaaaaaaaaacaactagagaagtgctttttaaacttttttaaaaaagtggcagaacatttaaaaacattgtaatcatatacatatcctcagtataggaaacaaaatggaaactgctctggtttaagagatggtgtcttatagatacctatccttttagcttttcccatgtcctggggtcgtctttgagacaccattgaggaaacctgtagttctggcaactatggtttaaaagccactgttctgagttttctattcacttattgtcattaaaattgatattaattaaccctcatttttctttaccatgcatctgtggggttttctaacctgctctatacatcttctgtgatttcactgtccacttgaatgacccacatgacaccatagctactcaattatttgcccgtcttctctctaatgagcttccctgtgccagttaagccatttacttcacagtctcgctttggacttgtcactcttaactgtttcacttccacaatattaatttagatatcctattcgtagaccataccgtctcctggtttgcttgtgcaactccttaaattataactattctttgacctcattggatcttgcattccatttactttctcctgatccatcagccttcattcttcactttcctctttccgctttgggtccatggcatgtcgtttctgttacactcttggcaatactgtactttaaatttcctcgaccccgcatcttttcattgtgttcagctggcagaagtcacccttggaggcagccagttattgtctccttctgcaccagattagtttcttcctgattttatgattgcctaccttaatgatatttgaacactgctccacagtcctattatgttcttgtgattgggcctacttttccactcattacagtgactaattcaaaccttcacttttctaaacttctgaatctttctacctctccatcaaagcagatgattttttctcctgtttaggagacaatgattaaaaacgttgatttaggagacaattattaaaacattcaaagaaaacttcctcattttctcaatttcaaatatgcaaacctacttgtatttatatagtaatcctattctctttcttcctatcacagtaataattatcaaacacttactttatgccagtacttagtgctttacaaagatcatctcactgaagctccacaaaaaccctttcaggtatatttgttttatagatgacaaaactgagaagcagagaggatatataatttcttcttggactcactgctagacagtggccaagccaggatttacacatggtctgatttctgagcctatacttttattaatgataacaataatggaaaacaagtcattaagatgctaagtaagccaaggtactcttctctgccctgtatataaaatttggcagcagctctgtgaagaactgctattattattattaccattttayaggtgagagaaacgaaacacagagagactaagttctctgactataggaccaaagtcatacagcaagtaggtggaggagctgggatttgaacacggacagtctggctcactgcgttctaccactttgattttattacaactatattttgcctcttatcggaggctgaactctccatccctcttttgtctcaggaactttttacttttatttgttttctcagtgtattgttgacttctttttcaatggcatctttcctttttctctgaaaaattcttgtcacccgtttaaaaacttcctcaaaatggcttatgaggctctgtatggtctagcactgcctaatgctcaactctcatctcctcctttctctttctcttacttttagggcctttgtgtatgtttagctaccaaaccagctcctcattcttctggtctcaacctagttgtcttttcctctattaggtctcccttttttagattctctcatcacagagttgctttcctttctgtaatacttgtcacatttgcagttttatgtttgttaatgtgattatttgattaatttgtattttttccaatagactaagcttggtgagttgggacagtattttttttcatgattatacccccagagtctagtcttcaatcataaccagaaaactgcaagggaaagtatttaacatctaaccaaattaatataaaataaaaaatgaagtcatttagtgtaggtgagatagtgctaaaatagataaataaacttgtagtgtcttcacatagcaggtactatagaaaaggtcaaattctttggctagtcttgtaaaatttgtttttaaccaaagggggaagaagtctatattttcagaggtgttcatcacagaattagctgtaataactaaagaaaaccctgacatatcacccatatgtccaataatgaaagagtagtcagtaaattaacattgtgatgtttatatagacaatagaaaacattgtcaatataaactgaaaaaagcataataaacagttatatttatactacatttgcaactaaatgaacataattataaatttggacaaaggaaggaggagtatggcaagatgaaaagaattgctttaaggtttatatatgtttttatttttttaataatgcattattttgtgattttaaaaagttactgtcktagtgttgcatattttttgtaacatcactatatgtayttttctctttttagtatggacctgtatttagttttaccatggtaggcaagacatttacttaccttctggggagtgatgctgctgcactgctttttaatagtaaaaatgaagacctgaatgcagaagatgtctacagtcgcctgacaacacctgtgtttgggaagggagttgcatacgatgtgcctaatccagtaggtgacactgttaccataaataaagacaaatctatacctcagtagttatagctaatagtgagacattatacatttaaaaygtagaaacagccaggcatggtggctcattcctgtaatcccagcactttgggaggccaaggtgggtggatcactcaaagtcaggagttcaagaccagcctggccaacatggtgaaaccctgtctctactaaaaatacaaaaattagctgggtggggctggtggtgcacacctgtaaattccagctacttgggaggctgaggcatgagaatcgcttgaacccaggaggcggaggttgcagtgagccgagatcacaacactgcactttagccttggcaacagagtgagaccctgtctcaaaaacagaaacaaaaaaccaaacacacacacacacacgcacgcgcacacacacacacacacacacacacacrgaaaccaaccaaacaaaaatgtaataaaatgtagaaccagtttattccttggttcaaaagtctgaagaatcatgagaagaaaggccatggataactgataagtaatgggtatttagttttatatttgctgtcatggctaaacaatattaaagggcttcctgtacaaataatggaatcaatgataacttagcatactgggatttaatttgaaagggttattagacaatgctgttacttcatcaaaaggacttcctgcctacccaytcctgcctgaaattctaacataagcgctgtttagagattgctgacttcagaagtcctcttttaatgcaacaacttcacgtgtgggrtacatctatgtgtatgttttaccctcaaaagccaaatacgaaattgttttaagttgatatagaacacaaatcagacaattggccccaatgcttggtatgggctctggctgtgaatgtaacacacattagccagtaccctagtatagcagttaagagttaacattaaatcttgtttctagtgatggggaatgagggaatgaatgcctctccttaaggccaaaaaacagggccctggaaaatccctctgttcagatatatatattcatttagactctattcatttagagtcagatagatctattcatttagactcttaaaatgtaaatgcccaaagggttaaaaccattacttgtgttagtgttacataattataataacctaaatggattttatgataaaacaaaaatgtgttttaatgccgtatccccgttttgaatttttttgaaggttttcttggagcagaagaaaatgttaaaaagtggccttaacatagcccactttaaacagcatgtttctataattgaaaaagaaacaaaggaatactttgagagttggggagaaagtggagaaaaaagtaagcaaaatgttttatgtttgtcctaacatttctacttctctgtgaatagaaaagtagagtatatatgtgtgtagtatataaaaaacaaattacagtgtatgtaaaactaccttagatttatgggagggttatgtaatgattaccatgaagttgtaactgagaatccagtttttatactgggctgcaagttaagtattgccttcagaagcaattgctgtgcccatagtaggaagcaacatctgcccacagggcagcaggacccagggcagcaggtcactatattctgggtctggcctttggcctctgtaagagttccagaatctttgtttttggtatacttaagttgatattgatatattttctaaccatacaagaaactgatgtataaattagaatgccaatgtaataatgcatgtgagacatataattacagcaccaagaaatccagaatatttactgatattctttttattgacaaatataattggaaagccagatgatcattggaagttcatttagtgaatgtggaattaacaggaaattaattggataatttttattagttgtcatcaaattatgcttgcctggtgcatttgtctccagtgttgggatatactaattggtgattatagttttcttttacatatcgccagtaattccattttggccctgatcttcctacttttaacctgggaaataatctgatctttggctactattccttgggaagtaccttattattgtcatatgcactataaataaccttttttctgcttttgttattgtgacctggaaatcaaataaccacatttattcttttcatgatgaagtgctcatgagtggggttttgagatgtgtttctgggatctgttttggctgtttagagggacagggtgcttcacattgtttgrtttattgcccctctttgttgttgtacatagtcacatgtctgtctacagactttttttgatgatatgaataggatcttgtttcttcttgagttctgtttttaattctcaattttctttcactttttggaaatagtaatgagaataatcttttttttctccctagatgtgtttgaagctctttctgagctcataattttaacagctagccattgtttgcatggaaaggaaatcagaagtcaactcaatgaaaaggtagcacagctgtatgcagatttggatggaggtttcagccatgcagcctggctcttaccaggttggctgcctttgcctagtttcaggtatggataaagaatatattacactaggttatttaactttgtataattattgtagtgttggtatgctttgccttaacaaagataaaaattaaacaagtaaaacatacaaaatgggtaagattatgaatcccctttcttctataagaattcaagacaaattttctttatataatgagctcatttaaagtaagtttcagtttattaaaaaggtgatttgttgtctgtctagtctaatattttatttatgtttttgtttttgagatggagtcttgctctgttgccccagctgtagtgcagtggtgtgatctcggctcactgcagtctctgcctcctgtgttcaagcaattctcctgcctcatcctcctgagagctgggactacaggcacgtgccaccatgcccaactaatttttctatttttagtagagacaggrtttcatcatgttggccaggctggtttcaaactcctgacctcaggtgatccacctgcctcagcctcccaaagtgttaggattacaggcgtgagccactgagcccagcctagtttaaaagcctgcttacctcacgtattccttatcctcaggaaagtctctgaactatacctaaaagtgatacagctcttctctagcacttgtttgaaatctttggtggctttttattgtattgtgaagtttctttgttttaaatatttgtgcctttatttaattttctgtttcttaaggacagggactgcctctgatataaagaaatattgctcttaggacttgatctatagcttagtgcttagtgttttgcatattagtaggctttctgtacttttgttgatttattggtgtttaggtgacagatggggaggagatagattgctagtcccttttcttctatttctgccccctctatctagttacagattggaagaggggtgggagtaaaaggaagagccaggagagattccctaaagttctctggaactcatcataccttatatttgcaaggagctttgcagtttcaaaatgttttcatatatcttatattagaacacccagcacagccctggactcatagtgggttctccataaatgtgcatttcttttttttttttttttttttggtgatggagtcttgctctctcgcccaggctggagtgcagtggcatgagctcggctcactgcaagctctgcttcccaggttcacgccattctcctgcctcagcctcccgagtagctgggactacaggcacccgccaccaagcctggctaattgttttgtacttttagtagagatggggtttcaccgtgttagccaggatggtcttgatctcccgaccttgtgatccgcccgcctcggcctcccatagtgctgggattacaggcgtgagccactgcacctggcccataaatgtacatttctacctgcctgtttctacctgctctgtctcttggatgaagtcagagcttgctatgttaggcccttcacattctggcccagtctttctttcttctactcataccaactaatttaaccagattattcaattcactttcttaaacaggcctatgttttcctggttcgactgtattcatacagttaagccccaacatcttctcttctgtacacatggtttcagttgatcctcaataacagattaacagtcttgtaaatgaaacagagtaggagttttttttagaaggcttgatttaagagggggcttgggagtcagactgcctagttttaaattccagctccaatgtttgctttctgtgtgatcttatgcagctagctataacttgaggttaatagtatgtacctcacaggaagataaaagtgagtaattcatgtaaaacacttaacatggtacctgctacatagtgaacatactatttaaaggtaaagtttaggagttgaagcttgttttctgaatctgctagtattttcaccccctacaaaaaactattgtattagaaagtgaaaagtagaaccagattccatrgaagaaccagagtgactcttctgctttaagacttgatttggtattaaaattggaattttatgttaatttaaaagagtatcctactttctgttgaactggaaaatacttctaaaggaatttcttgcttgttttaggcctttagtttgaacacaggcaatgtgttaagaatctgggatatatatgttaaataaagcacagttcttgcccttagggactatggacatttttaacaatgtaagattttcatgacttccagtatgttcctggttctgatttttttgtcaattattttagagtcattaaagttggttaaataagatgctttatgctcggtcctggttctcaaaatgaatttgatcctagaaggttatttctttatttaagaaaatcatctttatcttttaattacagacgcagggacagagctcatcgggaaatcaaggatattttctataaggcaatccagaaacgcagacagtctcaagaaaaaattgatgacattctccaaactttactagatgctacatayaagtaagagctattcagataacatattaagctgaagcaggaaattacacattaaaacacagttaaatagtatttccagttaaaaaacagtgatgctggcaaaataagttggtagctgtgatctttggactctttaaattgttgagacataaactattggcatcctgtgtcttactgtaatcccagtgactgggtatggtaaaagtttgctaatgaactgtaatggagtcttttgtaatcaaaatcgttttgtgctggtctgtctcttccctaagagaaaaaaamctcttgacttgtgatagtcaaatataagagaccactatacctgaaaaatgtattcattatgacactttatttaaakgttgaggcatgaaatgtatctgccaaaatgttaaatttgtgtctttggttcattccttagggatgggcgtcctttgactgatgatgaagtagcagggatgcttattggattactcttggcagggcagcatacatcctcaactactagtgcttggatgggcttctttttggccagagacaaaacacttcaaaaaaaatgttatttagaacagaaaacagtctgtggagagaatctgcctcctttaacttatgaccaggtttgttggatttttcagtttcattgctgccttatgactttgaggatctgtggctaatttttaaaagggacaatttgagattttctatatactatagcttaaattgatcagcttctctatttttagcaaattccctataaccttacctaaaatatcttaatgttattgcttcttgccattaagctttatcagatatgttttgggttgatggcttagagatccttggggatgtttctttggtacttacttcctctgcttcaaagtctggcttctgtacatagaggatattatgtgcatgttgtgtgtcttatgaagtgtagaagcctctgaattacttagaattctgtatgtccagagtggcctgggcatgagcagagacttctaaaagtagtagtagtagtagtaatgaggacaagacatttacaaatactacatgcaacttgctgggtggaaaggaagagaggacaactcactgcacaacctgacattccatcttggaagcaaaccttggtgatgtcatcttcctgttatcttttgtgcttttggtcctatattaatatggcacattacactgattttcagatgttaattgtattcctgggataaatcctactttgtcatggtgcatagttctttctatatgttactacatataaacttgctggtgttttgttgaggatttttgcatctatattcataaaggatattgatctctagtttcactgtgatgtctttgactggttttgatatcaggatcatactcatctcatagaatgtatttggaagtattctttttttcttctaatttttggaagagtttgtggatgattggtgttaatccttttttacatatttgcaaaaattcagcagtgaaatcatctagatctgtgcttttctttctgagaagactttacttactaattcaatttatttgttacaggtttattcagatattccatttcttcttatgtcagtttcagtagtttatatctctctaggaatttgtccatttcatctaggttacctaatttgttggcatacaattgttcatagtattctcataatcctttttatttctgtaagctcagtagtgatgtctcaacactcattcttgtttttagtaacttaaaataacagcttaactgatatatttacatagcataaatccatccatttaaaatgtacactttgtggtttttagcatattaagagttgggaaaccatcatcataatttaattttagaacatttacatcactcccaaaagagagctggtacccattagcagtcatgcttcattctccctgactgctgyccctggcaaccattaatctccttttgcctctgtgagtttgcctattctggatatttcatgtaaatgggatcatacaatttgtagtcttttgtgactaccttgtttcacttagcatgttatcagggttcttccatgttgtagcatgtatcagtacttcagtctttgttattaccaataatattccattatatggatagaccacattttgtttatttgttcatcagttgatggacatttgagttgtttccaccttttaaactattatgaataatgccgctctaaacgtttgtgtactgattttatgtggacatgtgttttcaattttggggggtcatacctaggagtagaattgctgggttataaggtaactttgaagaactgccagactgttttaaaaagtggctgcaccactttcaaatctcactaaacagtatatgttggtcctgacttcaccccctcaccaaacttgttacttgatttttttattataataggtgtgaagtgatacttttttttttttttttgagacagagtcttggtgygatgcccaggctctagtgcaatggcgcgaccttggcttactgcaacctcggcttcccaggttcaagctattctccttcctcagcctcccaagtagctgggtacacaccaccacgcctggctaattttygtatttttggtagagacaaggttgtaccatattggccaggctggtcttgaactcctgacctcaagtcatctgcccrccttggcctcccaaagtgctgggattacaggtgtgagccaccatgcccagttggtattttgttttgattttgcatttccctggtgactagtgatgttgagtgtcttatgatgtgttctttggctttggtatacttctttggagaaatgtctgctcacatcctgttcccatatttaaaatgagttgtctttttattattgagttgtaagagttcatctatttttttttaatgtgcttttggtgtcagagaaactaatgcctaatcaaagtgtatgaagatttatttctgtgtattcttcttagtgttttgtagtttcatatcttacatttaggtctttgatccattatgaattaatttrtgtatatgatgtgaggtcatcattcttttgcatgtgtttatccagttgtcccacactgtttgttgaaaagactattttttccacgttgaattgtctttgtaaaaaaatctattatagccaggcgcagtggcacgtgcctgtattctcagctactgagaagctgagatgggaaggtcgcttgagctcaggacttggggtccagcctgggcaacatagckaaaccctgtctctgaaaaaataaatacattttaaaaagcctcttgaccataaatttaaggctttatttctggactcagttctattccattgatatgtttagtctgatgccattacgtagttttgtaataagttttgaattcgggagtgtgagtcctctgactttgtccttttcaaggctgtttatctactcctagtccctttagtttccatatgaattttggggtcagtgtgtcagtttctgcaaagaagctagctgagatttttgacaatgattgcattgtatcgccatattaatttgggagcacaattttagtctttaaatctgtgaacatgagatgtctttctcttattttagttctttaatttctttcaacaatgttttatagtttttggtgcacaatgtttaaacttctcttgttaaatgtattcttaagtattttattattgttatttttttgatgttattctttcttctgccagtccaaatctgctgttgatcccctcgggtgaatttttcatttcagttctcatacttctcagttcttgaatttctatttggttctctaaaaaaataatatattgatattctccattttactagagatatctaggcatattttgctatagttctttgaacctgtttataatagctgatttaaattcattatctagtaagtccaatgtctgggcttcttcatggatagtttctattaaactgcttgctttttctatgtactggccatactttcctgttttggtgtgttttttgtaatttttttgttgaaaactgtacatttaaaataatgtggcaactgtggaaatcagatgccctcctccctgggtttattgttgctggctctttgttgttgttgttgttgctgctgctgtttgtttactgcgtttcctggattaattatgtcattccttgttcagtgaggtcactgaaatctctgcttgcttactttagtgggcatctaatatttggacagagatttactgaagtgctttgaacagccagtctcctagcttttgctgaaaggctctgtatgtgtgtgttaggggatgttattaacactccaacaggcagttacaagtctgccttcactacctgtgtgtacaggtcagccagaggtaaaagattacagcctcttagatcttacctgggcatatgcatggtcttatacatatgtgtggccttcaagattctcttatgttggaacttttcaaagtctcctgtggacatcttactccccagttttcccttttaaacttcttgttctgtctcttagcaccaactgatatcaccatctcaggcgccttcagtgttaaacaatttttgctaaatatttttggaaaatttgctctggctcctctaatagttgttaggcttctggctttcacagctgctatagttgtcatgctgttggtttccggggctaccatggatttggggagaggaggatgaaagaaatacaacttacactaccacaaagcttactcttcttaccaagattcagatttctttttcttgaattaactctccttagattgttgcaagcctttggttaatcttccagaattttgaaaaagttgacattaagattgttgctactgttttcattttttggaggagtgaatttttgtaggttcttacttcattcttcagggcaatcgcttctgttaccttgccctcctttttcaccatggacagtggtagagcatgataaccccagccaccctgaaccagttacctctgtacttttagctggaatgcaagctgtcttgtactaactaagaagttaaactaattttttgtactgttgaagtatgttatttataacaatcaggaaatgctttctcattttagctcaaggatctaaatttacttgatcgctgtataaaagaaacattaagacttagacctcctataatgatcatgatgagaatggccagaactcctcaggtgagtatcttggctacatcttcccctctatacccccagtttttatcaaaaagaagaaataggtgggtgtggtggttcacacctgtaatctcaacactttgggaggctgaggtgggaggatcacttgaggccagaatttgagaccagcctgggcaacatagtgagactgacctcatctctacaaaattttttctaaaaattagctggccataatggcacatgcctgtggtcccagctgcttgggaggctgatgtgggtagattgcttgagcctgggaggttgaaactgcagtaatccatgatcacgccactgcattgctgcctgggcaacagagcaagaccctgtctcaaaaaaaataaaaataaaaaagaaagaaaaagaaaagaggaagtagagtagcataaaagagatttttttaaattaaaaaagtagaataatcacttctacctaatcttcagttttatatactctaaaaacatatttttacctaattgtagatagtatacgtgctaatctgtttttttttttttttgagacggcatttcactcttgttgcccaggctggagtgcagtggtgcgatctcagctcactgcaacctccgcctcccgggttcaagcaattcttctgcctcagcctcccaagtagctgggattacaggggctatccaccattgccgtgctaaattatggggtattcaaagtcacagatggggttaaccccatttggggccaggcttgatctagaaactccggacctcagtgtgatcccacccgctttgtgcccccaaagtgctgggattacaggtgtaatcccgcgcccggcctacatgctaatctttaatgctaatcatgttctgcatttttctttaacaattggggttttaaaaatcaaagtacatatttttcttggttttaaaaataacattttgttgtaaaaaattgttaatatgaagtgtacaaattgatagtgaaagcctctctgaaattccaaccctacctccaaggcattatgggtttgatttgtgtactgtgtacttccaacccaacgctggctcactggaaatcatcttgagttaaaataatttttagtttgcctattatctagccagtttttaaatrtatgtacagatggttcttgatttatgtgattcaacttataattttttgactttatgatggatttatcaggatgtaaacctatcataagtcaaggagcatctgagtatcccatgtatattcatgctttattacacaatgatctgattatttgtcagcacatttttaaattctctaatgaaatgtgtggcttttgtttatagactgtggcagggtataccattcctccaggacatcaggtgtgtgtttctcccactgtcaatcaaagacttaaagactcatgggtagaacgcctggactttaatcctgatcgctacttacaggataacycagcatcaggggaaaagtttgcctatgtgccatttggagctggtaagatgattatattttagattggaaatgtttgttctgataacatatttgtctctgtcaaaatattccgaattgtgtttacaaattatctctccctttcctcatagggacatttttgcaaacttttttaggagaagaatctttataagttggagaaaaatatttcctttgtaccaaatggaattgttccataaatccttatataatgcttcactacttcctaacctgtctggttttattaggtctaatttttatagaacatccttgttttcccttacaatggtatttaaagctctttgtggattctcttttaaagaaccattggagtcagcacaccattcagggaataacagattactagcatttcacaaaaaagcaaaggcagtcttttaaaattaaagctcttctcgatcgttagtcaacatttttgctctctgaatatccgtatgagaaaatggtctttaaatttgggcaggttgtgtgtaggcttgcaaatttcatttccagtaagatcctaaaataatttagctatacccttgtttctccagtaatttctctgtccattggttctctgtactgattaaactatattctatgctttagtctttccaaagggatcatttaaatgacagatgacttgtcattggtcacactttttccacatataaaggaaaatayaaagtcctttgggaacttcagatcttaactttatgtaataaatttaatactgtggtgtataacacaatatataaaagaatcatagttttttttttgagagagtcttgctctgtcacccagtctggagtgcagtggcacaatctctcagctcactgcaacctccacctctgggttcaagtaattctcgtgccttagcctcctgagtagctgggattacaggtgtgtaccaccacgctcasctaatttttgagcttttagtagagactgggttttgccatgttggccaggctggtctcgaattccaggcttgaagcaatctgcccaccttggcctcccacagtgctgggattacaggcgtgagccatgccacctggccaaagaatcagattgttaacagatgggaagagcattagttctgtagcccaaattctgccccaaagaggaatcgtttctaaactagtaattatctggtttccacttgaactttactagaaatgggttgtgggttgttcagttaccttttatgatggctcattctatgtttggacagctgtcatttttagagccttatgttaaagctgaaatctgtttctttttaacatctcatttatagttggtcctaaccatagtctctgaacttatattgtatgaggtatttgagtacagatataatgtctcctccatctttttttcaatctttgtgttagtttcctagggcttctgtaactaattacaatatgggtggcttaaaacaatagaaatatattctatcacagttttggaggctggaagtgtgaaatcaaggtattggcaggaccgtgctcctccttaaggttctacaggagaatccttccttgcatcttcctagcttctggtggctcttggcaacccttggcttgtaactacattgttccaattactacccctgtcttcaacaggctttcttcttgttcatgtctctgtatcttaacatggcattcttataaggacaccagtcattggatctaagtcctaccctaagtcagggtcatctcatcttaaataattgtgtatataaagatcctatttcccaattaagatcacattctaaggttctggatggacttgaatttatggggggatatatgatcttacgttaatcttgttaaatatcacattacatgtctctaatttctttactcattcttttacctcgtaattgtgctgtttatttatgttggtgcatatagttcattcattttcataatattacattttgtgaatcatcagaatttatctactcttatgttgattcaattaggatacttcttgcttgttgcgattaaatccttggactattcttcctgtaagccaagcttctctttagttsttatatttgaaatatggaccaatttgtaaatgctcatcttaaatgtcactcctagaaataagtacagttatgggccaagcaagcactgtgctaagcactatcagtttaggttttttcttttgatgaaaaatcttgcaatgaaatgcccaaatcttaagtcaacattcattgagttttgacaaatgaataacctttagtttagtccaatgtatcaatcttttaaatggttattgctttctggccctgtcttaaaatttttgcttagcccctgagtcatgaagatattctcctgttcttctctactgaaatttatgctgttagcatcatggtttgtgacccttcttgaattagtatttgattatggtgtgacataggagttgaatttcatttttcccccatgtaatatctagttattcctggaccttatgttgaaaagacttgcttttcctcattggcttgctttggtgtctgtactgataatcaaataaccataaaaatattctgttctgggctctctgctctgttccattgatctatttgttgatccttacctagtaccactctgttttatctttagtcttgaagtcagatttgaaatcagttttatgtcctccaactcagttctttttccaagattgctttggatatcctaggtcctttgcatttttatatgcattttagaatcagcttgtcagtttctacatgggtgtgactttttagtatattattttgggttcattaaatctcattttcttccatacatttataatgacatttgaggtttgattggaaggttttcatattgacttttaactagggctttcttgggacaaacagaatattctactatattcccaaactagattaccatcttatgattcaaactttccatatatttaacccagatatatattttcagaaaaagtaattggaaaagttatgtgatcagtcaagtactgttttcctaaaatgtggtattgaaaatctcctggaatttttaataattcatgttgttttatgtgaaaagaatgtcatctttttattatattatctgtacatttgctgttcatctaaaatgtagataatatcaccccaggctaaaaaggatgagaaagaatttaaactgattcttataactttttcttttttttagggcgtcatcgttgtattggggaaaattttgcctatgttcaaattaagacaatttggtccactatgcttcgtttatatgaatttgatctcattgatggatactttcccactgtgaattatacaactatgattcacacccctgaaaacccagttatccgttacaaacgaagatcaaaatgaaaaaggttgcaaggaacgaatatatgtgattatcactgtaagccacaaaggcattcgaagagaatgaagtgtacaaaacaactcttgtagtttactgtttttttaagtgtgtaattctaaaagccagtttatgatttaggattttgttaactgaatggttctatcaaatataatagcatttgaaacattttctaatagttatgatacttatacatgtgctttcaggaagttccttggtgaaacaattgttsaggggggatctaggtaattggcagattctaaataatataatttccagatagtaattttaagagtactcatcgctcttgccaaataagttcagggtattcaaatcttggactagtcctgcaaggtayaaagaataaaaatcccagtgagatacttggaaaccacagtttattattatttatctgggcaattattgtgtgtgtgaggatggaagggtagggaataatcgaacatctaaagccttgaataagagaatactaattgttttggtatgatgatactcagaaatggagatattataggaaaaagaaatcctttggaattttaactaaaatcactgcatatgggaaattaagagatccaggaccatatttgataagakttcctaaaaataatgtaattattaatgctaaagactgctcatgtatcttgatctaattactaaataattacatatttatttacctgataaatatgtatctagttctacaaggtcacatttatgtggaagtccaaagtcaagtccttaggggataattttgytttggctcagttgttccctgcttcctttttttttttttttttttgagatggagtctcgctctgttgcccaggctggagtgcagtggtgcgatctcagctcactgcatcctctgcctcccgggttcaagcaattctctgcctcagcctcccaagtagttgggattacaggcacctgccaccatgcctggctaattttttgtatttttagtagagacrggggtttcactatgttggctaggctggtcttgaactcctgacctcgtgatccacccgccttggcctcccaaagtgctgggattacaggcatgagccaccgcacctggccttccctgcttcctctctagaatccaattagggatgtttgttactactcatattgattaaaacagttaacaaacttttttctttttaaaatgtgagatcagtgaactctggttttaagataatctgaaacaaggtccttgggagtaataaaattggtcacattctgtaaagcacattctgtttaggaatcaacttatctcaaattgtaactcggggcctaactatatgagatggctgaaaaaataccacatcgtctgttttcactaggtgatgccaaaatattttgctttatgtatattacagttctttttaaaacactggaagactcatgttaaactctaattgtgaaggcagaatctctgctaatttttcagattaaaattctctttgaaaaaatacagtctgtattcatgaattgtaaaatatgtgcttcagtgagcagagttagggaatccaggaacttgggtggggaaaaattacatctttatttgcactaataatttctaactgcaatttagtatttatttcaattatgaatttgggcagcattttattagcagtatccatgattttgtcaatagaaatctcagatattttcatattacagatgttacagatttcttgaagtatctagttacgaccccgagataaggctagtctaatgtttagtgaatagttttagacttcttaacagatttcatttttaatcacagactaattaattattgagatgcataaacaagtgtgattgcagaggcctactatcataaggaggcgtggtggtcaaacaatggcactgaactcagcttgatcagatcatttgtccatctgtttttttctccactgtctcttagagcagaatagccttgaatggcaagccatgctagctgaaaaaggtttttacccacaacctgccccttcaactaactgctttagagtacgtttgctatttttagaattcctcttattggaacccagcttctaatgtggaaaatttaagtatagttggctccttttatttgtgggttctgtatcctctgattcaaccaactgcaggttcaaaataytaaaaataaaaccccacaataaaaaaatacagtattagcaactatttacataatgttcacattgtattaggtatcaaataatctggagatgatttgaagtacacaggaggatgtatgtagactatctgcaaatagcacattgttttataagagacttaagcattcgcggactgtaatatccaagggggatcctggaactaatcccccacacatgccgagggatgactgaaattagaaatgttcaagcatgtacaactttctaccatgcctgtttgtgttggtataaatcatggaacatcaaataataagacaaaatcctccaggtgtaagcatcaaatactagtcctcttgctgttttagtgagttgccatgttattgaggaggactccagatgagaaataacattgcgatctgtattatctctgtgagagcctcccagtctgaatttggcttggacaacagggatactgtttaattcggctgcaatgtgattaagatcttttgagttaatgatttcttcatctttttagtgggccatggatttgtgagaacacatctttggaaacaagtaacactaactgtaatatagtaaatactgattaatcatgaaataccaatatagcttttaaaaaacactatgtagatgtaaagttgatacaaagacacatggaaaactttcaacagtattaactctaagattaggacaactttctctgaatctctcactcctacatatttgacataagtaatgagatgctatgtaccaagaactatggctcagttaaaaatgaagaaggttcaaatacagtgtggtgaaaatggtgaagtcatttttatttcagtacttgacaaaataccccataaaattcaaaacttctaccattatacaaaaataggtctctacaagtgatattatctgtcttcatcaccagtagaatatattaggcaaaacatgtaacttcagtagccttataagaaaagtgcaggacacctcgagctacacattcagcagtattgtaatgcgtaaaagtttaatcttttcacccatttgataaatacacaaggtttataatttaatgttttaaattagcattccacaaatatacaggtaattcaataattattgtgcatgaatacatacacaatgcttatatatacaaattccagtttgttttcatgtgctggcaaggkatttgtatacaatcataagctgtgttcatattggtcccattgaatattcacaatacaaaagcacaaaagarccattgatttacaaaaggaaatctatttaaaatcacttcaattaatgatgtttcaaaggattatcttctcatgccagcatgaaattgagtagttgaacctatgagagaaaaacaggaaattcaactgatttcaaattacattgctacctgtatcagacccaccagagttcacacaaaggaaattattattattctccatttttttaaagccctttttttccttaaaatgtcctcttcatacttaaactgagtctctccccactacccccaaggtggagtgttactctgttgcccaggctggaattcagtggtgtgatcttggctcactgcaacccccgcctcctgggttcaagtgattctcctgcctcagcctcctgagtagctgggactatccacacatgccaccatgtccagcaaatttttgtatttttagtggagacggggtttcaccatgttggccaggctagtctcgaactggttggtcttgaactcctgacctagtgatccgcctgcctcggccgcccaaagtgctgggattacaggcatgagccaccgcgcccagcccatatacttaagctgacttttaagagattttgaatatatatgtaaaaatcaccatgactggctctatggcaaggtaggtgagactaatatttagagtttttttaaagtgctctcaaagttggatgttctatacctcatacatttttgaaaaatcttttggtcttcaaaatctgggtcttgtgaaatttggatgctcaaaacaaaacaagcctaggcaaaccaacaaactcagctatgataataaaagtttcctattactacaagatgcttgggtgtaaacaaatgatttcttgaaggaagagataaactactcaatgattcaaagtctctgaatcaggagtgaactgaagtgagatagggaaaagaggttttccttccatgaacagggaatccacctttattttaaagtatgacttgttttttgtttttgaacaaagaaaaaataatccttacaaagtattttaaatgggatagtttttttcgatgatacataaaagcacaatatagtagcagggataatggttacattaagygcttaaagtaagtgcttcctccttaactccacccgatttgcatgccttaccactttcttttttttttttttttctttgagacagggtctcgctctgctgcccaggctggagtgctgcggcacggccttaccactttctgccatgcgctacttaggaatacgttctccagttaggctctgtagactcagagtaccttgcacactggtgctcattgtgcattttgtgtcatcagtccgctgaatgaacatagtaggaaatcatttttgggaggagtgggatctggggtgataaatcatattttcacttaaattatttaaagtcagtttctctgctggttacaagagtttaagctttggctaacttaataattagctcatgcactaaactggaagctttgattatcctaatgagtgtgaaagaatttcaaagaaaggggagctgtgggtctcgcactgtggtgctgccaagatgtggttaaactcagagcacctgactgtatagttccaagtcgtctttgcagtgcctctagccgagtgatataatctgttagggctctgtcaggatcgtaattctgaagctgagaacatgctaaagaaccaggattgaaatcagctggagtgcctgggtacctaaaggattaaaaatatgtacatgaatcaagttatccagaaatatgcatataagttaccaacctgcctccactcccttccccaaaaaggtgggtcacttgtacacacataatgtatctcctccaagcttcagctttggagcttgggatgagaaagagacaactctccaatgaattcaaagatgctactaagtcaacataagaatgtccaatacaatgcttgtggcagaggtctcaataaattgggtatgtataaatgtatcttgtcatgaagactgttaagcttttcataatgatcagagtatcaattttagtcaatacttttcccaatatctaaccatagcatacactaaataacacttggtcagcttgtttgctatacccttggaaatcagttacaaatttaaacactggtttttacatttttacattaagccttaggttatgtatattttttttctttttttttttttttggagaccaactcttgctttgttgcccaggctagagtgcagtggcgtgacctcggctcactgcaacctccacctcctgagttcaagcgattctcctgcctcagcctcccgagtagctgggattacaggcacccaccaccatgcctggctaatttttttgtatttttttttgagacagagtctcgctccgttgcccaggccagagtgcagtggcacaatctcagctcactgccagctccgcctcccgggttcacaccattctcctgcctcagcctcccaagtagctgggaccacaggcgcctgccaccacgcctggctaattttttgtatttttagtagagacagggtttcaccatgttggccaggctagtctccaactagctggtcttgaactcctgacctcatgatctgcccgcctcagcctcccaaagtgctgggattataggtgtgagccaccgcacttggtcatattatgtaaattatatataacaaagatgtctatctcaatgcaaagaagtcaaagccctaaaaatgtccatttatctctgttaaatattaatacatttaacaattccaggcaggttttctcatattcttacctattctgaaatggtaaaggggacctaatatagtccagatctgatcttgagcgatacgtagtatgtcttggttctccatataactccagcccaccagaagaatgataaaatgagtcagtcttttctgcacctaaagtaacccaaaatattccttgtaaagaaaaataaaatcccaagaccttaaaaaatttctacaaaataggtaactgctcaaaagactattatactatattatacaatctcctatttatagtcattttctattattcttgataaaggagaaaacagtacaaacaaaaattcggctttcaaatgttattttgtttacttttgaatatgagtatttctgatatctggaattatgtctcaaagaaaattatttaattggcatattttcttctttaaagaccttagctctaagtagatgagaggtgaggggtgtctgagtgggtgtggcttgtgggaaatgatgtggataaaaaatattagaccaatgtaaccattccaatctactgacttgaaaccaagatttgctaacttttaataaaacacaacttattatggtacaaatttcagctgtttcagtgtaatgatatttcaaaatactttgtgtagggtaccaaatctatttcccctctgtaggatgctcagctcctggtagagtatgtaaaggtggtttactatgaatacacagcacagggatgctgtgtcctctgtgtgctccccagattcggacctcatctttattgccagaaatgttcaagccctagtttgtttccacttctaggtgtagacagaaggaattttagctgttaccattattatacaacctgttggtaaactcagaaacttgtttgaatattgttaaattatgaaaacttcctaattcttccatatgactaacagcaatcctgtcttgaaccgtgccttaaatgcagttatgaagagtgtgggctctggacccagactgccagtgtttggtcctggttccatcacttccctactggccattctggggcaaatgacttgtgttttccatgcctcgatttttcatctaaaagtgagagtagtaaaactgtacttatatcataggattgggagaatacatgaaaagagcatggccaggtgcagactaagttctccatgaaaatcagttattattaccctctttaaaacagtgaagttacctagttttggcagttataagggctttgtctttggaaaacattgcttccagaattcattacttggtaagtattacacatgcagtaattcag

SEQ ID NO: 94238 - DNA, 25103 bp, Homo sapiens
  misc_feature (1)...(25103): n = A,T,C or G
cttccttcctctcttgtggatgagaagagttccgtagacatggtcttcgaattctcaccaggagaaaaacaaaacctagctaggaggaaaacgtcatctaaatcggtacatcacagttccctcagctttcctaaactcctccaccctttccagccaggcgaatcaacactggaagaggggcaaccccgaagggtgattcacagcctggcttaaggttagaacctgaattcaccgacgagaggcaaccttaggaccttaaagatggaatgaagagaggattttgacttgttccacgccacacagctcgagactcctgactagaaagaacccgggtctcgtaactcgcgatagtccccattcggccctcccaacctctgtctgtgggggcccgactggaccctaagggggacaatggggtctccgtgattccgtggcggagacggctgcggacttacctcaagcctggagtctgaggcttgcctacaagaggagagaaagtagatagggatcggacacaggcgaagacttgagcagaatgaaaggaaatctaggggaaaggaggtagttaactagattgcagctctgccttccgactgggtaggccaacgtcggactcagagtcttccctgagcagaaggccaaagttacggcctctgagcaagaatatcaacagccgcaggcgtcgaccattcaaaccttccgccagcccagtaacctatccccgctcgcctctaagctgcgtcagccaatctccgcgcgcgcgcccagggcctcatggcctatcgttgggctcgcagatcacctgggggcgtgtgcttgctctggaaatggtaagacttgccccgccccatagccagagcaggatagtgtttggcccaccagcgttaggcaggctgcggggtaagctccgcctcacggggagcctggcgcatcattggctctccctctcaccaatctccacaccctttctgttttcctcgttccctcagccccacgaaccccgggagatttaaaccgcgccttactagtgatgtccattcactagggtaatactaggagagattattttgggtggagggtgttgtaagcgtttcattttcttcgcttctttctcgtgccgttttcgcggacgttttcttctaagttttgctggccttccacgggagatggagcgtttgctgccggcgtggcaagtgttggggcgagacgggtgtgtgtgtttatgctgagaggcattagccccttccaagagctttgtttggtgtttcttttagtgtgcagcatctcagagactctagctcacgtgggtaaaaagaaattccgttgcagggaaagtggaggaattaaatcatcttggtataatccttatcgcaatccagaggacctcaaagattggttattaatgaaaatttgaacattgacgaggtgatatttataaattattggccggacgcgttggcccacacctgtaatcccagcactttgggaggccgaggcgggcagattacatgaggtcaggggttcaaaaccagcctggccaacatgatgaaaccccgtctctactaaaaatacaaaatttagccggttgtggtggcacacacctgtaatcccagctacttgggaggctgaggcatgagaactgcttgaactcgggagacagaggttgcgccactgcactccagcctgggcattagagtgaaacaaacaaaaagacattcctaatgttagggatttgcttttaaataatcctgtgctgggggaaggtattgatgatacaagattgaccctgactgttgagtgatgggggcaggagggtccatcatatctgtgcttctcaaggtttaatttgcacactaaccacctgaggacctgctaaatgcagattctgattcgggatgtctgggttgcggttgcggcccaagattctgcccttctaacaagcccccagctgatggtgaggtagctggtcctacgaccatactttgcgtggtaaggtattaccccatacttcttacttcaatgtatatttgaaaatttccataataaaaatgttcaaaataaccttggaagctctttaagatgtaggctccaaaaacgataattcgataggtctaaagtggggtcattatcaaggcccccaggtgctacccatgcagacggcttgcagatcatgctttgagaaaaaaagtcaaaatgcaacttgtgtctgttgtcaggatcttggtggtggtagtggctgagaggcacagtgtagccagctggtttttatcctaatacccttttcatctgcagaacctgcttccccagaaaggagatgtgtgaagattctttgtcctctaggatacagacagtgagtgtaggagttagcacagaaccttgctatgccaggtgagtttgaaaatcaggctggggattaagggagtgtgggatgagttgttatctgctttgacgactacagtataatcacactttgtgggaaattgtatacttccctgcaggtgggaagtagagacaaagttattctctattggtggcaaaagcagatagattatggcaagtgcacacctggctaccagtgctttctgcaccaggtcctcaagtaagtgcagttgtgggtggtcacaacaaaggtgtcagccaagtggctttagttcaatgtcaggtgatggaaatatactaaaatctgagcactctgacaaagttgcagcattcctaaaacaaattctccaaaaatctagccccaaaaataagtttctgagatttctcaaatggaacttatacacctagctcttaagagtattttttttttttttaagatggagtctcgctctctcccgggctagagtacagtggcgcaatcttggcccactgcaacctctgcctcctgggttcaagttattctcctgcctcagcctcccgagtagctgggactacaggtgcccgccaccacgcctggctgatttttgtatttttaatagaggtggggtttcaccatattgtccaggctgttctggaactcctgacctcaaatgatccacccacctcggcctcccaaagtgctgggattacaggcatgagccactgcgcccggccgcccttaagactttttacagatgcagtggtgcgcctgtagtcccagctacttgggaggatcacttgagcccaggagtttgaggccagcctgggcaacatagtgagactgtctcctaaaaacaacaacaaaaaaactttttttttttgagacagtttctttcttgttgcctaggctggagtgcaatggcgcaatctcagctcactgcaacctctgttcaagtgattctcttgcctcagcctcctgagtagctgggattacaggcatgcgccaccacacctggctaatttttgtatttttagttgagacagggtttcgctgtgttggccaggctggtctcaaactcctgacctgaggtaatccacccacctcggcctcccaaagtgctgggattacaggtgtgagccaccatgcccagccaacaaaactcttaaaagctctacgtttgttaatgaggttgttttcctagcaaacattttcactatctcctcatgattccagctggcttagctaattgcaacatacttagctaattacatgtaagtttacatgcatacatacaaactgtgaaatggtagaattattttaaagggaagtcaaatattgtcttttatatcttgatttatgagggtgttggaatatatctaagttatccttcccagaagaaagaatattagggaggtgggaagtttggtgtttaatctgatttgaagatttactttttctgttggattgagggcattgatcctatgtcatccttggggaatccctatctaggctcctgattcactgtgataagcagtgagctgtgttccttcaccttgacctcagtctgactcatacatgttgttgccagggcacagtgacagcccgggcttcaccctgaaacaccaaacaagaacaggaggtacagccatcactcctgggatgcccagatcaggcagtggagaagagccctgcattcctgggatcctcccagccagcctctgcagggcagaggggctgaggggtgtgttttctattcctggttctttttatgactggtaggcttagccctacttctccccactttgcagaggtttagctttcactgggtgaaaagggaaggtctgaatcgagtgcatgttcctccaactcggctgttccttcctaggcagggaatgaagagtcttagaaccaatggattccactcctttggatgacctcctggatgactggctccaggccctggagccctcagaatatggatggagagtatcctttgctgaaacccactggagcagggtcacagatggggtttggcccatgagggcataattaagatgcagttcaaagcagtggctcaagaacaaaagactaaaaagggggcagcagggaaagagcaggacatgagtaaaaaatccttgggaactaaaagtggaataaggagatttaattatgggtaggagtgttgggctgcactgggaggccattttatagatgacgaaaggggatgtaaccttcctttgaaatgaggcctgaaacttgacttgcagggtttttttttttgttttgttttttttgttttgttttgggtctcagtttctttcaatgttttgcaaatgagccaatgcctacttttaactcaaccatttaattcataataattaaattattaatttaattaataataaaaaggtgaacagcttagtggtgaaaagcaagggcttttagactgctttttgagagtacctttgcctaccatgtgggcagtcacttaacttcttgggctgtttcatttgtcaaagagaaggttttgtttcatttgatgattgtaagaaaaaatgagaatatatatcaaagtatgtaggtcaagtgtggtggttcacacctggaatcccagcacttcgttttttgttcatttgttttttttttttttgagacagagtctcattctgttgcccaggctggagtgcagtggcacaatctcggctcactgcaatctctgcctccccggttcaagcgattctcctgcctcagcctcccgagtagctgggattacagatgggcgccacaatgcccagctaatttttgtattttttagtagagacggggtttcactttgttgccaggctggtctcgaactcctgacctcaggtgatccgtctgcctcagcctcccaaagtgctaggattacaggtgtgagacaccacgccaatcccagcactttgtgaggccaagatgggaagactgtttgaggccaggagtttgagactaccctgggcaacatagcaagacgcctctctctacaaaaatagaaataaatatgctgggcatggtggcacacccctgtagttctagctattcaggaggctgagatggaaaggattgcttgagcccagaagttcaaggctgcagtgagctgtgatcgcctcagtgcactccagcctgagcaacagcaagaccctgtttttacaaaaaaaaaaaaatgtagcatggtgtctggtacataagagcaattattggaaaccatgtgtcccctacttcatggcccctaactctgctccttttgccaaggggaaataagcagtgcaaggtaaatctttccacccctattttctcagttagtactgtacctcatttttcctctactctttttcagtttgtagacttggtggctcctgcctcctcccctccctggctcagtgaggacgacccccgccactggctctactttccagctgatcacagctatttacctgtcccagtcttgagtaaggcacaaaatatttacagaaaacagatgtctttcagaggacttgctgctaagtgtaatagtgaagattacttgcattactgctactttccaatcaattaaaaaaaagaaatagaaaactttgtattacaaagagatcacaacacgaacgcattgtttaaagcctctcctttatccacttttttgcttgtctccctaaaccatctgtgatgctagctgagactcgaatttacataagagccagaaaccatcaacccaacctcttcacacactaacgtctacattcaatctctttaaaaaagacttaaattttggctcatgtgggagrtggtggtagtggtggagacttaataaaaggtggttttgtcttcctgaagtggaaatatagcgccgtcaacatcttttccccatctgcctgtttcctccttcccyttctgtttaaggaaagtctaaccaccgcacttctccccacctccccgcacctccccccnggcaaacgcaagcaactgaaccgcctatgatgtcataatcacaatcccattacctcatcctgctgggggggagggggcggagagagaagagagggagtgaacagccctgggctatcctgagctttacaaagtgttctgggtgagggcaaattacagaaccaagtggaaacgtccccgcaaccattataagtcctgggtttttaaggttcaggccgatccggcagctgcaagaggggctcctgggactccgagcaggccctaatccgcgcttggaccacacttcccagcagccttcacgccrcggacgggtcctttgctgggggaagggggattccttcgaagaggtgrtcgtggagggcggggcagcagagcaggtgaggggcactgtggctaattgcgtgacgcggcccgaaccgagtgggaggctgcagttgggccgttggagggagggagggmaggggcgatgcctttgtttaccttcttccgacatggcctcccccgcgggtttcaagatgtgcctccaactggggccgtccactttctgcgatattttggagggggtgactcgttagtgaggaaaccacccccatccctaaatcaaagcgccaggctcgttcccaacagcgctgtccgagagacactttgagagagacacgacacggagctgcgccctccatggrtggcttggggggattctgcgagccggagctgtccccctactctcctcagggactcgttggttcgcgccagcgccttttaagggcaccgtggggcgaaccgagcgctsagagctgctccggccgcggccctgggagytggaggaaccgcggtaggtggtggagggcaggtggcgctggggcctcggggcgggcacctcaaccgtccctccctccttccctctttcccctcccccagcccgaccgcccgcgcggccgggcctcgctggccgcctctgcggggagagcacgggacccggtgggggagggggtggcggagtgctaagtcccagaccctccccatcccctgcgtcctgagttcgcttcccgcggccagatgatggaacctagtgggaagaggcgaacgacagcccccctgagcgagccctggcgcacccccccccccgccccggggaccagcggacgccccatgccccaccccgcggggacaggcagggcaacagagggagaggttgaagattggaggggcctasccttttgcttcttcatgggggtggggggaggggtgttccccacttgtcacccctttccccaccagaaccatatggaagaagagcaggcagatctccacctacctgttcatgcagctccctgccttcctcatgtttttcttcagtctccccaggaggtgtggggctgggacctgaggggaaggtccccaaagggtttgtgactctcctccctgttggcctgacctgatcctaccttgtcttggtacagcayaacctcagcatccctgaaacaggagtgtcaggggttactgccatccaataggagatggggtgggggtctgatctttatttttgggggctgctggtggagggaaagcctggactgagagttaggtctggtggggttgctgagarggcctagcggcctgctgctctgtgaagggctgagccccgtgccagttgttaaactgagaagttttaacttgtttagtgaatattcagggctgtctctacccttcagatacacaaaatggaaggggaaggaaggcggcaagagagggcttcttacacttttttcaatgcctgcttgagaaagaggaggcccctcgcggagctggtttgccttcttttgtgtcctggtttgattccttatggcttccgttctgttccccctcgcagcctggcctgttttaggaaactcaggctgagagtatcagttgcgtggtggyagttgcattgttccaattaccactgtgtgtggccacatcccaacaattaaaatgcagaaaaacacaaattcactgtcttgacttgatcctagaggtggctgggagtttgctgtttgtccaaatgcctcatgaaaagctggagagtttgcttcattccctgctcctcatagctggttagcctgaggcctggggtctctagggtaaaatcctgcacttaggttycctctctggttgatctttgagggcagcagagttaagaaaccaagagcagaagtgatataagctttagcttctcccgtaagaatataggggaagcagctgaagagagctccccggaagctagaattttgttcagggtggtaataattatgcatgaaaatgatagttaactgtaatgatgattgacttctcttgcacctttcttccagagaactccaggtacatccaggtttatctctttgctcttccttgtgccctccttctaaggtgtgagtggggtagagataattcctcttttttgtagagtgatctgcccccaaggtcacagaaggaagagccctcttgggcttttcttagtgtgcaggtgagggaggatggtattcagccagagagatggaccctattgccttcttcatcttattgatttcattacttctgacattctgaggccttgaagattcacaaacgggaacgagaaatggtagtctgtgtggactcctgatttttataggtcagatggtacattttgtacattttaatatgttatattgttcctgtgacaggttaagattattctgcccactttacatatgggtaaactgaggccaaggagtattaaatgatttgtcaaaactcttagcaaattggattaataattagatttcttgatgatttgttctcttgactagctaatgctacacacattctctggtaagctgtcagcttgctgctcatttccgggaatagatagaacaaaatcaagacactggcttaacctccccttttcccttgagcaaggcccctcaggtaattgtgtgggcttgaagcctgttatctgatacagttagtttgcttctatcagaagttgaccacgagaaagaatcttggttaactgtatccatggactttgcatcagatgaggctaaaaacttagttgaacagtcatggagttgttgtttacgacgtctgtagagttgaaatgtattggaattaccctgaccatttctttatcttcccatttgataagaaaacaaacactgtatctattggaaaacaataatatatcagatgtttaggctgtgggaggacataaaatcctatgtactcaggtctaaagcagaaagtcttgcctacaaccactgttcttccttgttctcttattactatttctgtagtttaggagaagggtacctcttttcacttctgactggaagataaaatactgggctgatcttgatggaaataatcatttgggcatccctctctctcacttgagcagctgttttctaagtggtgctggtattccagttagaaacaacagagcatgaaccagtttaagggtngcaaataagtttcaacttgattgccaactctattttatttcatatctggactgccaagttcataatttctgaagctgtgtttaggcttagctggaaagagctgtgatcaattgatgtctgccagaggcctggcttaggggtgctgtggtatgtgtgccatgcattttccatctctggaccaggtgcatctctaatatcacttggggctggtccctctaattggcagactcagcaggcatgactggagagggaagtcccaatggtgctagaatggtgctgcagtggcagaagacggctcacaagtgaggtctggaagaacaacagggaagacatccatcatttgctccaaagtgtgcaagtcaaatcctggggagaatcatgataaccctgatcactgagcagctacagaagcagactctggatgagctgaaatgcacacgcttcagcatcagtctggtaaaagaccagtcttcctgcttctccacgaccccctcccccttttttctgaggctgattgttgctattactttactcttgtcctgtgctgtatgaatcatggtacttaacctggaagagcmcactaatggctcaaaacccagcccaaaaggaagggggcagggatttttccacygatagagaagggacagcaaaacttgggtggagaagggtttgagatgttggaagatgtggattgtttgacttactaactttgggaagacaagaggaagaacacttaatgtccctaacatccctgtagctcatgaatcgcagaggagaactgaagagggcttcctagaaatctgtcagtgtgtcctgaatccaaatcatgatggatattctctctttcttagcctttgcctgatcatgcagacatctccaactgtgggaactctttccagcttgtgtctggtaaggcatcgtgtgtgtttgtgtacgtgtgtgtacccattcctctctccacacatttctatcattggtttccagtgaccagggctagcgagcctacctctagaaccttcttgccagggtcaacttctgagattgacagttgtctttcatgttctagcatgaaagttatctggttggtttgctcttattctagctttgtggggacttgtataatctaattttttgaataggtaatacattcacatggttcaaaatttaaaaaataacaacaaaaaggttatgctgagaaaagtctctcttactctcccgttccctatctacccagcttctaccacctccctaaaagtattagtttcttatacagtatatgtgactagaatttctttatataaaaagaagcaaatgtatatatttatttcctttcttttttaagttctcggatacatgtgcagaacgtgcaggttcgttacataggtgtacatgtgccatggtggttagctgcatctattttatttccacgtttttaacacaaaaggttgcatactatatattattttgtacctttaaaaaaaaaaatgggaccgggcctagtgggtcacacctataatcccagcactttgggaggccaaggtgggcagatcacctgaggtcgggagttcaagaccagcctgaccaacatggagaaaccccatctctactaaaaatataaaattagccaggcgtcgtggcgcatgcctgtaatcccagctactcgggaggctgaggcaggagaatcacttgaacccaggaggtagaggttgcggtgagccaagattgcgccattgcactctagcctgggcaacaagagcaaaactctgtctcaaaaaaaaaaaaaaattgctgggcacagtggctcatgcctgtaatcctagcactttgggaggccgaggtgggcggatcatgaggtcaggagttcgagaccagcctggccaacacagtgaaaccctgtctctactaaaaatacaaaaattagcctggcatggtggtacacacctgtaatcccagctactcgggagggcaaggcaggagaatcacttgaacccaggaggtggaggttgtggtgagcccagatcatgccactgcactccagcctgcacaacaaagcaagactccatctcaaaaaaaaaaaaaacaaaaaacaaaaaaaactttaatatagctaggagatctttccctatcagaatgctgagtattcattcccttgttatatatagctacatattattacactgcatagatgtacagtggcttatttaatgagttttctattgatgtgcatttaggttatttctaatcttgtttggatacataaaactgtagtgggccagacgtggtgactcatgcctgtaatcccagcactttgggaggccgaggtgggcagatagcatgaagccaggagttcgagaccagcctggccagcatggtgaaaccccgtctctattaaaaatacaaaaattagctgggcatggtggcaggcgcctgtwatcccagctactcaggaggctgaggcaggagaatccctggaatccaggaggcggaggttgcagtgagccgagatcgcacccactgcactccagcttgggcaacagagcgagattccatctcaaaaaaaaaaaaaagaaagaaaaaagaaactgtagtgaataaccttgtacatatgtcattttttcacatgtgaaaatatatctgaggtataaattcgtagattattaattactsagttaaagggcccctgatcgtagggacatttagatggaggcatcactggtggacaatcagaactccctaactcgtgctgctcagcagttctgcatctcattttcttttctgggatacctagcaagggaagtgagttggcaaaaacatgttcattcagtctcttcctcctgtttattaaagacttgctgaaagccaggtattgtgtcataagtatagagcaggaactcatggtccctgccctcatagtggttagtagagggaagaactatagaccaaatacactcagtatgaattttgccaccatcaagtctgacttcgtatacttgtcrtttgccccaaatatccagcccctgcagaattccagccagctagccagaggagtttggattaggccctttgtcccttaatgagccgtctcccaaaagtcacaattttggttggaatacagtgagtgaggattgtttcttttagtccattttcccttccttctcttggtccctccatctgtttggatttaagagaaggcctaggggaagggaatcggaatatgtgggtggccagacagaaacgaagatgagcagcacaaagtcagggtttcccaagcccaggtttcactgtcaaaggccttccccaccctgtttgccctccctaggaataaaagtgatctcttacctgcctgattacctcttacttcttggcagtcctaactcctgacttggtgctgttgacacatgagaggaggaaaggccgagaaagaagagcataggcctgcttttcagcatccagggcaagcgtgggggaggggcgagggagagatgagcaggacactcacaaacgtgtttgtttctcttgacttcttttacctttgagagggagtggcaggcagtagatgaaatgtttttgattccaggtagttggtcacaatggaggcaatagagcatagtggtttaaaaacctagccttcgcatcagacagacctggatttgaatcctcctttggtcttttgagtgctatgtgattttgggaaagttattgaatttctcttatctgtgaaatggggataatgataacgatactacctacctcataaggtttttggaaattttcacataaaatgctccatacattatgtggcaaatggtaagttcttaaaaaatgtaagctatcattaatattattcttattataaatgccttccagaaggtgcttcctggaggggcctgccccactgttcctgtgctgagttccaggacagcctcmacttcagctaccatccctcaggcctgagcctgcacctcagaccacccaktcggggaaactcccccaaggagcagcccttctcccaagtcctaagacctgagcccccagatccagagaagcttcctgtgccccctgcccctccatccaagaggcactgccgctcactctcagtgcccgtggacctgtctcgctggcagccggtgtggcggcccgccccctccaagctgtggactcccataaagcaccggggcagtggtggagggggtgggccgcaggtgcctcaccagagccccccaaagcgggtctccagcctcaggttcctccaagctcccagtgcctcttctcaatgtgccccagctcacagaccctacagccctcctttcttcagcctggccctggcccaagattcctctcgaccctgcgccgcctcccctcaaagtggctcctgggagagtgatgctgagtccttgtcaccttgcccacctcagcgccgcttctccctgtcacccagtctgggcccgcaggcaagcckcttcttgccctctgcccggagctctcccgcatcctccccagagctgccctggcgacctcgaggtctccgcaaccttccccgaagccgctcacagccttgtgatctggatgcccgcaaaactggggtcaagcggcgccacgaggaagacccccggcgtctgcggccttcgttggactttgacaagatgaatcaggtgggaccagcaagactaggggagcttagatgggagtgtggggactgttctgtttccacttttgagctagcccctagcttcattaccctgccgcccccaccaccaacagcacctcctttagctcttagctagggtgacctaccatcccagtttgcctgggactgtcccagtgttagcactgaaagtccccccatcctgtgaaatgccttaatcctgggagttagagaaactggggtgagacccatgttaaaccttccaacagagatcccaaattgtcctgcaagaggtactttccctcctttccaagaatgcacaagctgcaaaaaattccatcagtacctactccttgtgcccaaagctgtttttgccacttgcctgtcactgcttcaaagtgggtctgtgagggctgaagcaagatgggctgctacagtgtattcatctgttagacaaatgttttttgacttcctggtgtgagtacaattattgtatgtatgcactttgctcacttttttcatattattctttctagaccactaggttacaaacctctttaagaattaattaattttttcatacagtcgtccatcccatctgcaaacatttactgactctgactaggcactggcagtacaaagtaatgaaacactgcagatgatgttcctgccctcacggagcttctattcttcamttcaatggaaacaatgggctccaaattttgtcagaaagtttacaaacgccaggcatggtggctmacgcctgtaatcccagcactttgggaggccaaggcaggcggatcatgaggtcaggagattgagaccatcctggctaacacggtgaaacctcgtctctactaaaaatataaaaaattagccgggcgtgggccgggcacctgtagtcccagctactggggaggctgaggcaggagaatggcgtgaacccgggaggcagagcttgcagtgagccaagatcacgccactgcactccagccagggtgacagagtgagactccgtctcaaaaaaaaaaagtttacaaacctcaccctaaagaattcttgccttcaggtgtaactgtcttctttgtttgtttgacagaaaccatactcaggaggtctttgtctccaagaaacagcccgggaaggcagcagcatctctccaccatggttcatggcctgtagccccccacccctctctgcttcctgcagccccactgggggttcctcccaggtgctgagtgaaagcgaagaggaggaggagggggctgtgcggtggggtcggcaggcgctgagcaagcggacactgtgccagcgggactttggggacctggacttgaatttgattgaggaaaactaaaactgagaggctacttcctggggccacacagactgactctctcatggctactaacaagtgtcgagkccccaaggctgggggccgagcctgggaatgggggtgagtggagggctccgactcarggcagctggaaatcttctcgctccagcaagctcgaccatgccaagagactggccgggacaagataaacggagctggtggcgggagggacagccccagagcagacccttcctatggcggccctgagtgtgagtatccctgccaccaagagagcaatgggcagggaaggaaggggtctgccgaccccagctcggggaatttcactagcccctttgcttcaaagggcacttgtgtcttagaatttggccagggtggggggttgagtcagcctcctcagagaaactgcgtgagagtgtgtgcgtgcatgggagtgtacttgtggaaaggtgtgtttgcgtagccttagggaaggaaggcaattgctccttaacagcagagtatcatgatacccccaggatcttgagttttttacaggatgttgggtttgctcaaggagtcaagaggagggcaccaagttttccttttttctaaatagctctggaaccaggcttgtaatccatagcatcaccgactctgcaaaggatttcattttggggyacagcagggtgttttaagtgctgtgacttcagctaatgatcttttcttcagccccaccccctccccactagctcgatctagtatattggggaatgcaggtggggggtgtcaccatattttttctgagctggcctttttttctcatcagattgtccaggctatattccacctgcctcttttgccctcttgagtagagttgcacacagcacatgggcaactgaagcagggttgaggggctctatctctctctctcctctgctgatgggacccttttcccctcaccctctgcccttctaagtcatagactaggtaggaaggccctatattggtccccagcatctactgaggcagacctgcaacagaagtggcattcagtccccagcagacatgggtgagctcaccccagcactgctgttgggaaggtgactgcaggaaaccaattcttacaagatccaggcccagcctttttgacctgcttgagagggaagaaggggtgtttagcatttaatagtttgcttgtcttccactcctgccaggaagtgtttatttgcctctaattgggcctgagagaccatagggaggttggggctcactgagggattggctgaggatgtataaagcaaaggctgtgagaagcagttgggagtttggttgtcattggattgaatttacttttttgtttctcacccgcaacttgagccaggacagctggtccaagtggccacagtgatgggtttaagtaccttggtagggctggcaccagtggaaacacatactgaagctgccaccacaatagcttgtgaggttttatccagctktggttagaccctgcatgaccaaatttgacctgcccttgtttatggcaagaagggcatttttctcttcaatttccagggtttcctaggacccagttcctcatgtaagggaggaagaccaaggtctttgtgttttcttcctcatggaattgaacctgacattttctggatctcctgcatgtcaggagcatcagtgaggcttcagcctcctygtctccactccagagaggaggtggctatgtcttcttaagcctctggccctcagaggctcctccctatctcctggctagttaccactaggctaccaggtctctaggggcctgagagaggccctctagagaatccagggaaactgtgagcccaggagttgcccatctatggtttcattcctcccctggctcttctccctcttcaggccataatttccctggtgccaatttcttttcctcctggggcatcctcatcccagggctctctgctgtagattggctgtgccagcttccaacaggttactggcaatgccagtgagtttctgtaggccctragctgaagaagtgaggcagtgattctgcctccatcctggtttccccaaagccccagggcaccatccttargggagaaggtctacagttatcattattttaattccattactttcagtctggaaaactaagctagtcagaactgtcatcttgcttcccaatctaagaacctgtggccctggaacacttttcaagaattggttcattttgctttacacagtagatctgttccaacagttctgtgtaaaccaaatgctatttttcaatgcatttggactgctgaccatttaaaagcagcctatgattgcttctttttgtaaagcaagcaacctccctccactttagctgttttgactatttgaattttcacatattgggcttacccagagtggagcacacctccagggcatgtggctgacactgggtcaatgtctgcatctgtgctgtgtgtgtagtgtggttggccagtaggtgagtatccctgtgtgtgtgagtgaagccactccccaggctggtgctctcctcctgtgcccagtgactgcccagtggcagctcagctgcccttcactcccacctgctgccaaagtccctgtgctaatgggattacaaatacaaaaagtggaaaaaaattttcgtaaactttgttttatattaaaagaaaaatccataagtctgtgtgtgttaaacatgaggttctgcctctgtggctgtgtttgaaaaaataaagttttattagaataatccattttcccaagcaaccttgtgtactacagtgtcttcttcccttccccacaaagacaaggaagaagcagggtagaaggccacctaactgttccagccccttcatctaagatgtgggtcaacctttcaaaaaggggcagtatttggaccctaggccctttgccggccatggcaggatgttatactgtggcccaggcttctgctaaggccttggttatttttggcagtctggtttggtctctctttccctggcagttatacttgtctcctcctgcctgctgtcactctmacttccagcaagttgaagtcaagtatgaatgcattccagctccctgagaaatggtttatggtacagtcaggaacttgtctagattggtttgtaggctttgggaagtagggagaaggcagggtgggagacagccagggatctttcttaagttttcacatgttacatcctggagagatagaggtttagtcatcagaattcagattccatagacctaggcaatttttccatcctaaaaatactgcttttggaaaataatcctagctgcaaagcttctcttttgttgtagaagacagtattttccctaatgtttcctttgggagtgttggtttgccaaaagaagctatgtggctcactctttagacctttctgttccaccctttcttctctctatgttgacattcttccaatgtgtgtgggtgaagtgtagttgcttagagatccaggcaggagcctctgtctctaaggcttagcctttctttaccagttgtggtgctaatttgccaggcagcaagaagagtcaagttgcttagcttatgtcctggtttcctgcttcaaattggtggcactcatcattgaataccaatgaagtgtgtgcaggacaggactgacttgactacctggagcaggaatctttgcaggggtgcacatacaccctagaaaaagtgagggttgtcacctgccctggaaacaaaggaagggctttggggaagtggtgggcagtggcatgtggttaaagaagcttagaattacagggttttttttctttaaaactgatgtttcatttcacctactgcttgagcaggggtaaagtttgaacatctaaaatgactttgtttccccctttttttcttttgagtttatttttgttggatttttctgctattttctgtgaggccaagtgtgattttatttttcattcctgaagtcttgttaatataggaaagaacgtaaactccatgagggcaagagttttgttttattcaatattgtgtccccaacactttgggaagttcctggcacatgaaaagtgctggtcacatttgttgaatgcatttcccttttgcctttcccatccgtgaacttaggtacatttctgtctctctgctgtgagaaactagccttggacattggggcagtagttaaatctctgtatgggagaaaatcccagcagataattttgatagaaaaattgcaaggcagatagatcttgtatggattcacccttgttcccctcctaccaactacagcttatgggccatgtgctttaagaggtggctctcagcccagaaaaacattctgagtcaggcctcaggttggctgtgggagatggaagttaaaaagaagtggagggaggaatgtttccttggtgctccacagggttggttctagaatgattttcctatatgttttatactttagtaaaagtataaagtcaatagttggttacccctctccccaagcctttgttacaagaaaagtaggtcaagggtgtagacaaggttatggacaggagatagctggggtaggcacagaagccttggagaaagaaccagctaccactatttcctgtctgtagggaaaatcaaaaagtcacttttagaacaacagtcatgggttattactataccctttatcttttgtatccattttgtgtatactcagtctctgcatccatgagaccatggaatgtgctagtccctgatattgccagctttaaatgattgaggcaatttcctgttgcttattgtgggtaacaatctagccaaaaatctcagcatctcactttctctgcaggctccttttctaatcaggagctatcagtctcccacacctgtattaaatgcattcagataagagttacagaattttctttgcccccagccccactaattccatggtaagatggagtgctactaagagaacccctttactgttggtctatttccagttcccctaagagttgaatggagaaacacgtagacttaataacattggcagactaggaaggggaagaagttaggtcggttttaggaaaaacaccaagatgttggggggcacgttggccttcagtcagtggaaagagtggcattatacatccaatggaagtaatacattggccaattggaaaggaacctaagaagtgctggcagtatagaatgggatggtgctgttatgggccattgagaaggaagacattgtgtctcatggaccaatggggagaacatttcctacaagacagcaggtaggagctcatattttcaggataggaaatcaatgggggtattggagacactaaatagctcaaaacatccactctctaggtaccttgcccctcacccccttaccccgtaaatgtctttggtatccgaggagagcaagctaaagccctctcatatatacgactccctgaaggaagattgagaccagggatgatgccatggggaagctgaaggacccgcccacttccctaccccggccggacctgcaattcccctccagaccgcagggggcactgcaggccccggggagattggggcggagcgctgcgaggggccaggagctgtcgccccgctccagagcgcggggggcgctgtgcggggcccaggctgcggctccgctcccggccacggggggcgctgcgctgcgccggtggttggtggtggctgttggggggggtgggggggaacggcggccgcgggtggtgcggagggaggccttgcgggcggatcgggcgcttggcggcggaggtggtgggaggcggcgggcgggagcgcgggtcaggccggccccggcgatggcggacgcggcggcctccccggtgggcaagcggctgctgctgctgttcgcggacactgcggcctcagcctcggcctcggctcccgcggcggcagcggcgagcggagatccggggcctgcgctgcgcactcgagcctggcgggccggcacggtgcgggccatgagcggggcggtgccccaggacctagcggtgagtggcggccgagtcgggcactcgaggccggggctgcggggcctgcgggcggcctccccgggggcctttgtgagggggcggtgggatgggggtgacccatttccgtgcccccgggtctccttagcgccccccgccggcacctccgcaccccgagcgcttgccggcatggcttccgcgtcggggtgtgcgccccggtttcccccggggggcggccagggcgtccggagctgctgcttgcagccagcaggccccgcctcctgggcgacccttttctcggcgttccccccaacacgccttcggagcaggctctcgaatcttgagctcccgggagcctcagagttcggccagtgttgccgctgccctctcgaagacgcggacctgtggtccccagcctctcccaggagacctgcgccctgttccttttctcccagagccccaagtggggcgggaatgtgggcagttatgggaggcacggaggctgcagttggagctggtcggggcttttttatctggcagttacttcctcatctgagctgggctcggcctggcggtctccagaaaggccagctctcggcactgtctcgagctctcctctcctttccttaacgcttctgggtgacaggagctgcagttgtggctgtttttgttaagtttgagatctttcttagtggccgaacggggctgctgggtagtgctttttgctcccagctcagctactcccccaaccttgggagaggttttgttttgaaactttgtgtttgggcttggccctttttgaatgccttggtgtgttttgtgattaaagttgttcagtcatacaacttaactagcattcgggatcatgatgtgttattctcgttaatgtggcggtaaaatatagtgtttgagttttggcaagccactttatttcctcattttgataggggccctagcttctctggtgagataaggctatgaaaaatggtgtgtgtgcgtgttggggcagggggtggtcttttggaatgtaatagatcagcaagcagaaagtaaattttcttgatgaacttgcttttgcagatataaacgggaacgcagtttgtgagatttggaagtaatgttgtaggcttccgatgttcatttttcttcctattgatcaacggtgttagactgtcctttttcactaatatacaagctttatggattttttttgtggatggcttaggctttgcttctgctacttgggttcatttgctttgatttttcttcatgctgtataagaaacgttactaggacatttataaggcctcagtggggcaaatttgcaaaaagatactaaaaatttaaggggatggaatgatgattaagactgggatttggatctctattcctctgcgctttctttaaaagatggctgggatgggaaaagaagtgtccatttcagattcattctaccaccttggaggcaaaacatacttaagatccactattatatgcatactttgaccgaaggcctactttgccctagctattcattgggatttttttctggttcttgcagtggtcgtctcgtttcctccatcagatgaattgctaatgagctctgcacctgaaatggctccccattcactttgtcgtttgctgtgctccctaagggcagaggattttggagctcacttccttgctggacacccactaagctaaatactgaataattttaccactgatcccacggaactgggttctcaaaccaagtaaaaagttgcagtgattcttggaaattaaagcaaagaacattacagctgtgttgaggtcttgcatagggctgtgtgaatgtagaagcaaaggcaggtttgtattttgagaatacatttatgcttgtcttacatgtatatccagggacatagatgagaaaacagccagaccaaaactcagagcctttagattttttcaccagcttgcaaaattgttcaagaattggtattttgttgaggttctattaatgacaatgaccagtgtaggatgagaatgggccgttttctttttttctcattaagagagatttcctttggaccgtaggcatgtggacctttccaatttgcaccacacacggtagtaaacacaactgtcttccaatcaaaagtgttcttcccgtactcaagggtggagtttgcaagcagctggcctgtgattgggcagattttcattcagttatgtttaagatgttttcaggcatgcttggttttgagtaatgcctagcagggcgcccccttttaaggatgagtaattgagggttggatgaatgagtttctgaagtgattgaaaacacacttcttaattttagattccacgaatacatctctttctaaatactttttgattcagatatcctataaaatacagtactgatccattaaatgaaaccttttttggaaaacagtaacaaagccaagtgctaccttaaggtgagatgtgaaaaaaaggagtcaggatcctgttgattgagagttttgttgataaggttctcataggtggacatcttcaccagcagaagccatgctgacaaattactcagatgtttagccaaggcatgaaaacagcttttcccccactttctagtggaatagtaattttatttgtgttttaaaatgggccttttatttttttagaattagtttatgggttgtatgcatttatctctggcttttctttcctaatctggtgtcctctttgtgttcctaaatcattattggctcatgtaagttgcagagaccttgggaccgtcacgtatatgggtattgtagataaaacagaccaaaaaaagaaacccatggattttcctttttttggttataaaagcaaagcttgtaatttgcaaaatgtcaaacaaaggtttacacaagaaaaaccagcaatctctttgctcatctttcttaatgctagtacaaaaaacatgaaaacattcaaccgtatacaaagagttccctctttttttagcaaatggtgtcctactgcacaatatttgcaccctgccttttttttctttcatttgacagtataccatggggatcaatacttacagattttactcatcgtttttggtaactaccttatattccatagaatggatgtaccataatttattcagttattcctcctgttaatggacattcaggttatctaaagtttttttggcagtatagacaatgctgtcattaatatacttgtatacatatttttatgtaatccaggttttatttctgtagtttagcaatc

SEQ ID NO: 94239 - DNA, 57856 bp, Homo sapiens
  misc_feature (1)...(57856): n = A,T,C or G
tcactaaaagaaagctggtttgtctatgataatatcagacaaaacagactttaagacaaagagcaatgtagggatataaagggataactgtgtcatgatataaaatttaattcaccaaaatgttaacacaattctaaacacataagcacctaacaaaatgtgttccaagtacagggagcataaattgataaaaactggagaggctgacaaacctaccatcattgtgggagatttttcaacatgcttttgtctgtgactggtaattcaagcagaaaacaaaaagcaaagatacaggatatttgaacaacaaaactaacaatcttgtaataatggacatatatcaattttgtacctaacaatgagagaatacaaattcttatcaagcttgtatttctcagattagattataaattaaccaattaggcaaatatcactacattttaaataaaagtataataaacattattattattattattattattattattattattttgagactgagttttgcgcttgttgcctaggctggagtgcaatggcgccatctcggcttgctgcaaactctgcctcctgggttcaagcgattctcctgcctcagcctcctgagtagctgggattacaggcgggcaccaccatgcccagctaatttttgtatttttagtagagatggggcttcaccatgttggccaggctggtctcgaactcctgacctcaggtgatctgctcacctcagcctcccaaagtgctgggattacaggcatgagccaccatgcccgacctaaaagtataataaaaattatgataacaatgcaaatatgtcagaagagacaaggtctctgttacccaggctgcagcatcaaactcctgggctcaagtgatcctgccacctcagcctccccagtagctaggactaccatgcctggctaattttttatttttatttttttagtagagatggggtctcactattttgcccaggctggtctcaaacttctgggcttaaatgatcctccagcctcaccctccaaaagtgttgggattacaggtgcgagccaccatgcctggcaagaacatatcttttaaataatgagtcaaagaagaaactacaataaaaatttaaatatttttgaactgaataataataaaaatgttatatatcaaaacttgtgggatacagaaagcagtgctttgaaggaaatttactgccttaaatgtttttaaagacaagaaaaacatggctgaaaattaataaactaaacacacaactttaagaaataacagaataaactcgaagaaaatggaaggaaggggataattataagagcagaactagagatagaaacgaaatagaaaacagggagaatcaacaaggacaaagttggttctttgaaaaataccaacaaaataaataaacctctgcaatgatttatctaagaaaaaatgataagaagttaaaggcaaataatttttatcagtcagttttcactataatatgctttggtaactacaaaatcccaaatctctgtgtttatttcttatttgctatatatgttgactctgctgggctctcctccacatgtattcttcattctggggtccccaatcacgcacatgccattctcatggaagagagaaaagagcaagaaagctggtagaaacatgtacgatatcttttaaagtttctgttcatgtacgatgatcaagcccattgacagctggttgggtatgcattcttctgtcacaagagtcacctcaagtcacatagcattaggtagaaatgtatagtcctcttataagaaaaggaacaaatatttggagagcaataacacagtctaccacaagtaatattataaatgaaaaaagagctataaatacagcagagattaagaagataatacaatcaataactatgccaatgagcttaaacccttagatgacatggaaaaaattctagaacctattattttattaaactgactcaaggagaaagaaaataattgaacagtttcataactattaaataaaccaaagtcgtattttacaaacttcacacaaggaaaatacccagccgagatggttttgctgtgctgttctgttctgttttgtttggtttttgttttttggagatggagtcttgttgctcagtctggtcttgaattccttgcctcaagtgatcctcctgcttgagcctctcaagtagttgagattataggtgtaagccactgcacccagctccagacagttttactggtgaattctactgatgcttgaaaggaaaatcactccaatcttattaaaattcttccagaggatacaaaaaaagggaatactccttatgtcactttatgagccttgaaacccaaacagatcaagacagaatgagaaaggaatatcacaagtccatgtttttcataaacacaaacgcaaaaatcctacatagaatataacatagacatagaatatatagagcacaatagcatataaaattgagactttatggtccagttgtttatcctaggaatgcaaggataagtagtttaatataaaatctataaatgtcatctatcatattaacatattaaagggagaaagaaattgtgtgatgatttcaatagatgtagaaataaattaaattcaaatccattcaagatttttaaattttattcaactaggaataaaaggtaccttccttaacctgataaaggagatttacaaaacgcctacaaaaatatcattctaaatgttttatcataaaatatacaaaaataatactaagtttccctttcgaatatcaagagcatcaagaatgcccactatcaccatttccaataacactgtactggaacaatgcactgccttctcccccaaaccagtgtaacactttttttttttttttgagatggagtctggctctgtcgcccaggctggagtgcagtggtgcaatctcagctcactgcaagctctgcctcccgggttcactccattctcctgcctcagcctcccaagtagctgggactacaggcacccgccaccacgcccggctaagtttttgtatttttagtagagatagggtctcaccatgttagccaggatggtctcaatctcctgacctcatgatctgcccgccttggcctcccaaagtgctgggattacaggcatgagccactgagcctggccaaaccagtgtaacactttaagatagataaaaagcaataagggttgggcgtaggaaagggggaaactggcattattttcagataatgattgtttacatacaaaatccaaaagaatcaataaataaattactacaaacaagagtttagcattgtggctggatacaatatcaatgtacaaaaatcaaatttatttctatatgatcatcaaaaaattagaaagcatatttttaaaggacatcacttataatagcaacaaaaactacaaagaatctaggaataaaatccccaaaagatgtgcaagatctggacaaagagaataataaatccaaattaaagcattaatgaagacctaataaaaagaaagttatcccttgcttatggaagactcagaatcataaaatgtcaattctctccaaatttatatattagttatttattattcaatgcaatgccaacaggtttttgttgttgttactgctgcgtgtgtgtgtgtgcaacttgtttgtgtgtgcaacttgagatgcttgccttaaaatatgggaaaactaaagaccaagcatagcccaaaaaaagaagatggatgaagaataaaagggagattttgcactactaaatatcaagactttttataaagctgtggtaattaaataatgtggtgttgacatcaagatagacaaattttccagtggaagagaatagatagatcagaaatagacccataagtaactggaatgttgatatataacaaagttgggaaaggtgggaaagttgggaaaggtggggctagtcaataaacaaacctggggaaaaataaaggtcatttgtatgtaaaaagtaaaatgggatccctacctcacaccatatacaaaagtaaattccagagagaataaggatttaaagatttttaggagtaagagtaagtgaataaatattagggtamggggaaaagaaaaacaggataaatattaataaattcaaagttaagaacatctaccaaaatagaaaatgaaaggatacatatggaaggataaatttgcaacacatataactgatgaagaatcagtgccctaagtttgtgaataatgtagcaaacaatccactaaaacaataataaaagactcaaactgactgttatataaagagccaaagatggcctctgtatctgggtccctgagttgtttatttcttcacagcaagctggtatctattatctcaaaagcctttcagcacctaactcaaatgtttatacatccaggcattttaaatataacccaactaagcagatttttaggcatttagagctgcttgcctgctttgtatacctcatgaaactgtgcccaacatctgttagtcatagataagataaatctgtggtttatgaagactccaatttgctgctgcccttgggagctttctgaaacagagacttcccacaggccgctgaacaacatcacctggacatggtaaggccactcccttctggaagtttccttctcttttccccttttggatggttcctctccacccccaatctctggatcttctcatgctgccaaggacttcccctaaatacaaacctgtcaaagctcacacaaataaagcttgagtgtgctactgtcacctcctggtcatatattttttcttgctcagccctaaaaatccctcaaatgccctacactgacatttcacagaagagaaactacagatggacaatacatatttaaaagagatgcttaacctcaataagggcagtttgagaccatgcattagcaaaagccaagaaatctgaggtgttagagaagatgtggatgctggtaggagtataaactggtacaaccactttggataaaaatttggtactatcatataaagtggaatactggcattccaaagtcctatcaattttattcctaggtaaatacacccaagagacatttttgcacaggggcaccagaaagcaatgctgatttccaacactgttggaaagagcaaaagactggaaattgcacaaagacttggcagctggagaatggataaattatggtacataacggatttttatgtagcagtgaaaatgaacaaaatgtaacttcggtcaataaagatgagtaaagaaaaatgtaccaggcccaggcctctagatgagagtttggaaatacacacaaaactaagaaaagtaaaaatacattgcttagtaatatatataaatgygaaaagaaattaaagcaatataatagttgtgtaaacacaaattcaggatgggagttacttctgatggagaggcagtggcacaagatggggaccacttacaagctgatgaaagttaattgataatattttagttcttggttagcatgtcaagttaaagaaggtgttcattatattattttaaaaatgaattcgtttaatttaatttaaacgggccattcaaagactactggttataatgtattattggctaattctgtggtctttttaaaagaggattgtacctacgtatcttctcaggccttccggcccaaccacgttataaatgactaaggagttcaatcaaggccatgggcaaaaatgcagcatcctaaacccatgtacctactccccactgtacccaaaacagcggcattaacacaacgtaaaaaaccaaggaagacgtagcaacaaaaaccttaatttcctagagcgcaaacaaaagaggttgaatcacgtggttcttcctcccacgcccggcgcgccaatgatgtcaccaatctgcgaccagaccattgattcccgactgaaggtagagaaggctacgtggtgggggagggtggggggagggtcgcggccgcactggcagcctccgggtgtccggccgtgtcccgaggaagtgcaagacccggtaagagcctctgtccttctcggctacacctgcctgggctggaacgcgcggcccatgcggcctctccagtctctggcgttgatgttagaggaagcgtgggggcgccccggcagggcactgagggtggccgcagggctgggtggggacgcagctggtaggggcacagtggccggtctcggcagccttccaggaggcggacgcccgggccggtgtacttttgtgcgtgtgtgcgcgcccgtgtgtgcgcgagtgtgggcggcagaggctgcgcacggatgctccggcgctcgtgccagccggagcccagcagctgggtaccaaaggcccaacagctgggtaccaaaggcccttgtttccctctcgccggctcccccgcctcggagagtgactggagagtgagctgcctgggactcgccgcggtaggcgcttttgctgcgccttctaccacaaactgcgttaggaccggccctttatcccagagataacatcgccgccctggcgtgccttccacagggaaggcgtaggaggccactgtggaaagctcactgcggggtcacggccgccgcgctcagcctgtctggcctggtgcaggaggcctagttgcgtcacctcctcttccttctctgtttagcttgatttgggggccccactagagggtaatccggccccaggtgtttcgtgttggtatcagagtttgggaaacttgccttccaaaaagggatacctgtcattggattttgaatgttgtgtggaggagcccaagtatgcaattagcggagggagcagagtctaggctgccacgggaggagacttgcaaacagaggcctacacagtgtcttgttgctagagagggaggcaggattgctagagcgggtcattgggggcagagaaggcaggggcgtcaaactgtcagcagttgtgatgccaacttctttctccaccagagaagccttgttcccatccttttaaagatctcttgaaatatcttggtcgttatttacaaacagttagtgcttgctatatgggaaaaagggaaatagagtggaaaggggacatgaactttggagtcaggtctgccactttgcagctgtttgacattgaatgagttatttaacctctccactcctacttgggcttatctacaaaatgaagataattatatctaccttgcccgaggtgtcagaattcgaagtgtctagctattattagtaagggcccagtacccaggagcttggacttgctcccttgctgaaggtttcctattggtacagctgcttgagaagcaggggaactttttgctattttagatgtttgctattctgccagatatgatatgcagacttgggggtggtagtggaggggaaatctcaaaatccataatctctctgctgtacacttcattaaattctagaactgcaaagaggtgaagatctcactttaggccgggtgcagtggctcatgcctgtaatcccagcactttgggaggccgaggcaggtggatcatgtgaggtcaggagttcgagaccagcctggccaacatggtgaaaccccgtctctactaaaaatacaaaaattagaccagcatgatggtgcacatctgtgatcccagctacttgggaggctgaggcaggacaatctctcaaacccaggtggtggaggttgcagtgagccaatatccaccattgcaccccagcctggacgacagcgaaactgtatctcaaaaaaaaaaaaactcactttattaattatagcttctcattttattttattatttttcaattttatcccgagtagctgggatcacagatgtgcaccaccatgcctggctaatttttttttttttttttttttgagacagagtctcactccatcgcgcaggctggagtgcaatgaygcgatctcagctcactgcaaactctacctcccgggttcaagtgagtctccctcctcagcctcccgagtagctgggattacaggagcatgccaccatgcctggctaatttttgtatttttagtaagacagggtttcaccatgttggccaggctggtctcgaactcctgacctcaggtgatccacctgcctcggcctcccaaactgctgggattacaggtatgagccaccgtgcctggcctatgcccggctaatttttgtatttttagtagagatggggtttcaccatgttggccaggctggtctcgaactcctgacctcaagtgatctgcgcacttaggcctcccagagtgatgggattacaggcatgagccaccgcgccaggcctttcgcttctctttagcacttgctatgtacctgacacggtgttgagcactttacatatactaacttatttcatccctctaacaactgagtgcactaaatattatccccattttatagatgcagaagtgaatcttggctaaggtcctgacattaattaacggcaaagctggaacttgaagccagctgtgtggtttgagtcttgctctttctcagtgtctagcaagtcttgctcttgcccttgctcatcaggctatgtggtttgagtcttgctctttctcagtgactagtatcccagcaatgtaaacctggtgcagtgggggaaaggaggcccagacagagtttagtgggccaggattggctgcaagaataacatctcaaattgtctaatgatacattatcttttattttacattttttactcagcattgtccagatatgaaccaaggtttggccttttcacccagagaaaaaggacaggctcatgggtacactgtgctgggatgacgggcacaaagtaggtattcggaaaatgcttgtggaaaaaagaaatcctgaggcattgttatttctgccagaaggaggcccagtgcttattacacacaggctccttaagccagctatttttatactataacacactgtaatatgagcatttttctgattcatggatttaaagatttgaagccctgtttcagaccaagattggtagtattatctgtgaccaactgattagagttctcaaatatgtgaacaacagaatctgagcttttgggcttctgtagtaatctcttgagatagagcaatttgttttgctataacatctgttagacttggaccttaatgggtacaactgcttgagttttctggagaacactggatgattgtttgacatcagggataaagagttcaaaatattaagtttgtctcaaaattaaatatttgggaaagacctgtgattgatgtgcattcattgtaggaatagtacactagttttaaacagatgatattcctggtatttttgatgagctattctgtgtcttaaagatgtttaaagatgacttgtagttgtatagtgaactattaggaacatacaaaatttatataacccatccatatagactgtgacttacacccccctcagttcctccacccaaggaggtctagttgctgcttctataccctctggttaccttgaagctacctatttcaccatctttatcagactttatcagacttaataggtgagaccctctgacatcagcctccctttccttctgtaccaccccttgccacatgcacacagartgaagctcttctccaaaaggactgtatattaatctacttgcaagtggcacaaacccagtgtaaattaacttaagcaaaaaaaggttttttcctccctttgattatttaactagaaagtccaaaggcaagcttcaggcatggctggatcctggggctaaaatgatgtcatgagggctttcttggcccttcctttttcggctccgttttctttattgacttcattctctcttgctgctttctttttctttttttttttttgagatggagtcttgctcgtcttgctctgtcgcccccaggctggagtgcagtggcacgatcttggctggcggcaacctccacctcccaggttcaagtgattctcctgcctcagcctcccgggtagctaggattacaggagcccgtcactacccccggctaatttttgtatttttagtagaaatggggtttcactatgttggccaggctggtcttgaactcctgacctcaggtgatccacccgcctcagcctcccaaagtgctgggattacaggcatgagctactgtgcccggccttcttgctgctttctctatgcatactgaaaaagctccctgtcagcaaccccaagcctatgacctgatggctgtcwtttagcgttgtaaattaaccattgctgacaaggaaatagggagaccacaattggagaggtctacatcataggctcactcttgggatgaggaagtaaactgcccgtccataaccttatgggatggggaagttcagaggtcctaggcaggcagaaacagcacatgactactgcaggggtgtgtgtatgcacacatgtgtgcttacatgtgtgctcttatctcacttctttggggtccttctagagccttccaactggaatgaatccagtgggttgtgtttgtccatcaaactttgactcccactgtggcatccattatgtgctctccgtcctttctgtacctttgcatctgctgtttgggttgcccttccccattgcttcatctggctgatccttctagattcaggtcatgcttctcccagaagccttccttgacaccttccttaatgagctaggcatcccttctctctgctcccataaacacctgagcacaacccccttgtagatgttatttctgtttgataattatctgtttattggtcatgtctccactagacggagagccccttgaggacagagtgtcctttgctttgtattccttatctcctacccttagctagtattatttgtcttcatagcactcataactgacattgtatatttatttgtttatttattgcctgtctctcctcattgactgtctttcattagcttcatgagaacaatgtggaaaggaattttctttkatcaaagcaaaacaaaactaccttgaggcctaggacagtgcctcatactggcatatagtatatgttcagtaaatgtttattaaatgaatgaatggaaatcttcccacaggaagaaaacactggcattatgttgatgaacattccagtctgcatgatagatacacttctcactgtaaagatctgaaacttgagtaccatggcatcccaggaaggtagcacacctcttcccatatgtgtttgaacctgcagaggtcaggcccaaggagcctccagctggaaattctaccctgtgtgatgtttcactcctctcaaacttttctgaactttgataggttgtatattaaggccttctccatattttggggccctttccttggagtatttatttttaaaacatttatttaagcacttacaaggtgacaggcactgttcttagtcctttataaatagcaactcactcttggactggagtttggggaccaagggttgtcaactttaaaacttttttctttttaagtaccaaaacactcaagaacagaaataagactactctgcatctagtccatcttgccctccagaagtagagctatctaacagcctgatacaggtcttgtccctgccctttcctcaggtttttacagccatagctagtaaatataacatactgcatctcatcgcctttgtttggycttcacccaaacgcagccacgctctgccgcaggatatgtggcagagccaggtggggaatcagtggctcagagcccactctgcttttcaggacataggctgctcaagcatctgtcttcagccctctcccagggagggcctaaacccacatcctcaggcccctgcagagcacatccatcttcctggttacatgttatgccttatctgtgggaaccctagccacgccacacccacacctcaacacatgaagaaagggaaaaaatacccctttctttcttttgacaacaacaaaaaagtacttctcctacaaatagagacttgaaatgacagggttattatttaaccccgctcttactccaaacatccaagcggcagtttcagcctagctgcagtactctgttgtagtgcttagtcctgatttgcttcctaagaagtgaataccagtttccactgccatcagcaatgcctgagtacttactgtgcctctccctcaccctaccctcctctccagaactgagtattttactaaaaaaggaaaatcttagctaaatttgaaatagcatctcattttaatttgcattttttattataattgtttgagccctttttacccatactgagccatttttatttctactttttaaatttttggttaatgttttgtctattcacttattgtgtttaagtgatttttaaaatatacaaatattctgaaaaacatgagtttatcctcatggtaaaaagcaaacaattttatttgcagttaattctttttagtttattgtttgccatctaattttggctttatcattaaaaatacaaatctatttttcattcttttttagacaaattttattctttttgatttcttttgcttgtgagcataaaaaggtttttttccttattctatattctagttttttttatggtttgcatttttacatatgacttttaaaaagctagcattcagttttatttcagattttaataagatatttgatgaaaatagtgtaatattttaaataaaatcagttttaattaaaggtctatgttttgttttaaggatgtttatattactgtacttatattttttctttttaaataatttatcagaatagcgaacagcttgcttgacaaaactaagattcacatatatagataatcataattttagtgttcttagcgtttccataaattgctgcatgaaaagatatttatgtgtggctgtctggtttaaagaggcactcgtgcttggcaacagcttttcagcatgtagccaagatgacaaattcagcctcttccagttcctcttcctcactatttccctaagatttttttcatgggagcataactatgtgtatctctgtgcacagattttatgtgtacctttcaatgtattttaacaaaaatatatccatttaactatccaaatcaagaaataaaacattttcattacctcagaaagctcccctgtggtagtcaccactacccccaaaggccaacactattgatgtctgatatctatcactatagattagattagttttgcctgttctaaaatttcatgtcagtatgtgcttttgtttgtggcttctttcagtgaggatcaaccatgttgcatgtgtcagtatccattgtgtgaatatgcatcaagttatttattcattagttgattgacatttgggttattccagtttggggctattaagaagaataaagctctatgaacagttttttttcctgttttttattgtagtaaaatacacaacataaaatttaccatcttaaaccattgtttgtttttttttttgagacggagccttgctctgttacccaggctggagtgcagtggcacgatcttggctccctgcaacctccacctcccaggttcaagcaattctctgccttagcctcccaagtagctgggattacaggcacccaccaccatgcccagctaatgtttgtatttttaatagagacggagtttcatcaccttggccaggctggtcttgaactcctgaccttgtggtccacccgccttggcctcccaaagtgctgggattacaggcatgagccaccgcgcctggcccgtaaaccatttttaagtgtatagttcagtagtgttaggtatagtcacattgttgtgcaacaaatctccagaactttttcatcttgcagatctaaaactatattcattaacaactcctcttttcccccatcctccagcccctggttctatggacattcttgtacaagtctttttgtggccatttttcttgggtaagtacccaggagtataaatgctgggtctagccttagaagaaactgccttacagttttctcgaatagttagtcgtaccattttatgttcccacagtatacaaaaatgctagtttgcttcatatcctcaccaacattaggtattgtgagtctttttttattttagccattctgtagctgtgaagcggcatcccattgtggttttatyacrtgttctagtcagttatttacatgtctgttcccattactagactgtgaacttcataagggarggttcatgcagtaagtagttttgttttttttgttgttgttcttattaaccttcctcttcttattttgagggtgatacatgctttattattaaaaagaacttaaaaattatagaaagctattaaaaagccaataaaatcacaggttagcccacctctcagacatcatcaggagtattttggtctttcaggcagtgctgtgttggttcgtacagacagaacagttcccatgatggttgattcagcaacccagcattgttccagcccactgccttgctatcctctggacatcacttattcccagcgaggagcccttttctcagacagccccagacagattgtttttgtggtttgctggccacaaatgtatcacatgtatcactgacaaaagaagtagaatcctcaatactggattaaattagattaattaacatccttcctctggggctggggagggaacctggccttcttaggaaagtggacagaatcagggcactctcagaaagggaggcatagttctagcgtaggccactaacattatctgcctctttttttttgagatggagtctcactctgttgcccaggctggagtgcagtggcacaatctcagctcactgcaacctctgcttcccaggttcaagcgatcctcctgcytctgccccactagtagctgggattacaagtacctgccaccacgcccggctaatgtttgtatttttagtagagacggggtttcgccatgttggccaggctggtctcaaactcgtgacctcaggtgatccacctgcctcggacttccaaagtgctgagattacaggcataagccaccacggccggcctgcttcttggtgtttttatttaatttttttacacttagtctttcaatacatttgcaatttgttttggcttattaatataaggctagactctagactttttttttttccaaatagccattcagttggcccagctccatctgttgaataacgctttttctcactgctgtttttggttcctcatcatgcattggatttctgcacatactaggctctgtttggagggaggtggttcttttctgttagtctgaagctctacccttgctttataccagtgctgccttggtttaattagcgtagctgtcttctttttaaaaaactgttttgtttgttcttgtacttgaactttatttattcccatccaatgacctattaattgcatctgaactttagagtaatcattttgtcaggtatccactccttactgccccaacctcatagtatttgcagtaaatcgttatttaatttgatattaattagtattcataaagtattctgccatcacatttgagactggtatgtccttctatttaagacatatattcctcagcagagttttgtaattttccacatgtaagctcttcacatttcttagggttagtcctagatacttcttttttttaatttaatgttttatttgctattaagaatatggtattcttaatagcaaataaaacattaaagtatataaagaatatatacttactatatgaagaaggtatacttatatattactatagtaatgtatatattactatataaagaatatatactttagatgcatatatacatatgcatataaagaagctattgtgttttatatgtttctcttatattcaaccatattccttgactggtattggttctaagagtttttcagttgatcctcttgaatcaactagggttatgatgatatcatctgcaaataatctatttttctttttaatagtttatctcttatttttgtttcataatgtagaatatgtaagaatttccataggtagaaaagatattaaatatatatatttaacatgtgttaaataccatatttgttttaagaccactgagcataaagacttgctattgatttaataacagatttggggggcactatattaaatgtatacttacactgtaattcatattccaatatcagaaatgttaggatgtaaaaagcagtgcatcttagaattaaggaaaataacaatggtaatggtagccctcctttttctcgtttgagtggtagtgtctaactgttccattctacatatgatattggctgttgatttatgatagacagtctttattattaaggggtcctcacacatcttcctgtttggargaggttttgtgttggtttaatcagcttaggagggaaaggtgatcatcagggtcactttcgtgcagaatcccacctctgcccacaattcctgccttctttgaactttctttgttaaagtaagaatctagactctggcatcaaagattgatatgctaagcagaagtttactgcccagcagagaaccagttgagtgcaaaagttaggctctgagatctaagccttgagggtggcaatgagggatgaggtaggtttttaaaactcatggtctccatcccatattagsaaatcaaagtctccaaatgctacttattggccaktgttatctggactaggcatkgtctaagcaacaagcaggacaggacgcttgcaggggtttttgataagttatctctcactatgtctatgagtcaggataatagtgccccagtcattgttttggtagaagtccagtccactggctaggcagccatgttgggattcatcactttgtagtttytaactttttactgtattccatattggaaagttcagccctcctctgagatacccattgtccactagaactccagacagaagtgctggagagggcagtgggccaggtcaggaagacataagccagagttgaagtacaacagtggaaagaacaaagtctttggagcagtgcctcttaaccttcgttctgggtacacagatctatctgggagtctgaaagctatgggctgtctcttgagggaaatgcgcatgttgcgtttttcagtaaatatttttgagcacgctgaaagcaaaacacttgtatagccctagcttcttggaacttgtagtaagagagacagatatttaccaaaaaaccacatgaagaaatgtaaaattacaagtgtaaatatgctccaaaagagaggagggggtcttgaaatcatgcgatgggagggggtaggggttagagctcaagctcttcctccagaagtgttgactaccctgagatctgaagggcaaatcataggatagtggaaaggaggagaaataatccagagagaggggcaagtatgtggcaggagggagcatggcaatctagagggaggaaaagaaggctcagggaggctgggggacagagagatggggcatggtccaacagaagggagaaggatggcagggctaggccacgtaaggctttggagccatcgtgtaaagatgtttgcctttatcttaagagcattaggaagccatcaaagtattttttgttaataatgtaaatatttgatatgcataaaagattcctgcagcatatatgtatcactgaaatacaacaatgaaacgaatgcacgtgaacctaacaccttcccctgaatgagaaccttatctgtattgctgaagcctcccttgtcgcctcttggatcccatctgcctgtgttccccctccccccttaattgctaggttagaattttcttgaattccatgcatgacatgatcagattttggttttcagagatcacacaagctgtgtcgagaagactggatagaaaagaggccaaagtacatgcggggaaaccagtttggaggttgtaatcacaaaacacaatcttactaaaagtttgtctgcattttattttattgccttggaaatttatttctttcacagatgatttattttcatcattttaaaaatataaattaatggtatcttcctagaaaaaaataaaatcagataaaactaaaagctctaattctgttggacaataatgagaaggctgtactgtttggcttaactaaaaaatgtggtgaggcatggtggctcacgcctgtaattccagcactcagggaggccaaggcaggcagattgcttgagcccaggagttcgtgactggcctgggcaacatagtgcggccctatttctacgaaaaaaaatttttttaattagccaagcatggtggtatgtgcctgtagtcccagctgcttaagaagctgaggcaggrggattgcttgagcccaggagtttgagattgcagtgagacatgactgtaccactgcactctggcctgggtgacagagaccttgtcttttaaaaaataaataaaggacatcatggctgtgcataagtacatctatgacagctagtctgttttggccttttccctttgatgtacccaaatgcagaaactcctatctcgcctagcaaagcctctggcagccctggacttggagctccctggtttgtattgtccagcaaagatgctgtagtagtttcccgtggctgtctgctgtaaaaaaataaccacaaactaggtggcttaaaacaayggaaatttattatctgacagtgctggaggccagaaatctgaaatcagtatcactgggccatgttggcagggctgtgctccctccagaggctgtaggggagaatccattccttgcctctcccaacctctggtgggtgctggcatcgcttgtcttgcggctgcgtcgctctagtcttcaaggctagcatcttcgaatcattctctactctgtcttcacatggccttttcctctgtgtgtgtaggtggaaatttttttgaacttgccaacactaaaagaaacacttttaaagaccagtgttcacttgaaaatggctctctgtcaaattccaagaaaaccagttcactgaaagtcagttctacaaaagcccctccatcctacccctttgcctcctcagtttcctcctcaatcttctgctctacagcagcagggagacagcagagcatatttcctctaaattctattaagaagacagaataaaaactggtcaattaagactagggagatttaagaaaaaagtaaatgcaacatattggttgtttcgtaaattggttatccaaggaattgaccatttggcaaactgactttcggcaaattggctgttggtgaaatcagcctatttccctgagaaacactgcagaaggcagggcagtggctgccttgagcctgcccaggacaggactgtgactgtcccctcctgctttctacaagccayggagataggggcattgctcttgcatgaggctggggctgagagcagccccctacaggctggatctggatcctagggaagaagaagatgggagatctccccctttgggtcctgactcaatagaacccaaatgtaggccagtagcggaacctctgtgctagccagagtcaggccagaagtcagtcaggtgctgcatccaagaacaatctagcatcggagaagcggcttaagggtgtcagaatataatgtataaaaccacaagttgtatagggtcaccccgtggggtagttatccgactgaatgtacatttattagttatacatacttgcaaaagattgcacacaggcctgttagtcattattattagtattattttacatatgtaatattattgcaaatgttatatctttattatataatacttaagcctggcacatatagctagttgataaataccactttttttctttgttactagataacttactggagtggataaatgcacttaatagcttttggagacctctttttcttctgggggtacctgaggcatttcttgctttctttttttttttttttkagatggagtttcgctcttgttgctcagggtggagtgcagtggtgcgatctcggctcactgcaacctccgcctcccaggttcaagtgattctcctgcctcagcctccctagtagctaggattacaggcatgtgccaccacacccggctaattttgtatttttagtaaagacggagtttctctatgttagtcaggcgggtctcgaactcccgacctcaggtgatccacccacctcggtgtcccaaagtgctgggattacaggcatgagccaccgcgcctggccacatttcttgctttcttgtaacttcaaaagccagttttagctgggagcaatggttcacgcctgtaatcccagcatttttggaggccraggcaggcggatcacctgagatcaggagtttgcgaccagcctggccaacatggtgagaccccacctctactaaaaatataaaaattagccaggcatgatagcgcgtgcctgtagtcccagctacttgggaggctgaggcaggagaatcacttgtacctgggaggtggaggttgcagtgagccgagatcatgccactgcactccagcctggataacagagtgagattctggctcaaaaaaaaaaaaaaaaaaagccatttgtgatcattaacatcaatagaatatatgtcagcataaatactgccacagagcactactcagccagttgggcaactcactcttctctaccaaaagctttacaggttatcaaagcaagtgggtttactgtgggaggctactgtgaattttggaaattaatgttgagggactagcgcagtggctcacacctgtaatcccaacattttgggaggccgaggcaggcggatcacgaagtcaggagattgagaccatcctggctaacacggtgaaacsccgtctctactaaaaatacaaaaaattacccaggcatggtggcatgtgcctgtagtcccagctactcgggaggctgagacaggagaatcacttgaacctgggaggtggaggttgcagtgagctgagatcgcaccactgcactccaacctgggcaacagagcgagactctatctcaaaaaaagaaagaaagaaagaaaattaatgttgttaggaactgttgtagtggaataaaaactcagtgataaagaattgaggagaaacaacgataacaaaaaaggagggcaataaatttgtgcctagcaactctgaattgcttactatacatttcctaagagttattctaaaatgatgccctggtacttaaaaataactgagcaggctgggcgtggtggctcacacctgtaatcccagcactttgggaggccaagaccggcagatgacgaggtcaggagatcgagaccatcctggctaacacagtgaaaccccgtctctaataaaaatacaaaaaaatagccgggtgtggtggcaggcacctgtagtcccagccactcgggaggctgaggcaggagaatggcgtgaacccaggaggcggagcttgcagtgagccaagattgcaccactgcactccagcctgggtgacagagcgagactccatctcaaaaaaaaaaaaaaaaaaaaaaaaaaactgagtaatttattactttctttgataatatgttgcaaattgtttagaatacattcacaggcagtacatttctgtcccagtatcactgtatgagcaaatactgaaggagtttgcagacatctgctttacagtagacaggagatagatgttccaattggatatagcccatgtgtgtagtaaagtctggttataggaaattacagattaaaaaagactgttgttgtaaacatgtatccctgcacgcagtaaggttaaacagaagatccacaacaaaccaaattaacaattactaagtcagactaacagttacttatagttaaaaagcaagaatagcagggattggaaaacaaaaccaactcaggagccctgataatagcatgtcctttcctataggtggggaagtctcaccccctgaatgcacctatagagctagagcttggcactgctatgtggaagccagacttctgagaatactgagtttctgagtacttcatttttagacagtaactcttaatcatttaggtggtttttaataagtagacctaggtggtatagatacatctggggtcatttcacaggcccctggggaggtgagccattctttataggaagagctcctcccttgagaggactgaccacccatgtgttggcagtgccgttacgcacggggaagttacgcacagggaaaatgctcgaagggtaggcacggatgaatgatgaattaacaatgggtgatttttattgtgtttgcttgtctgtattttctgaaataaacctattatttttggttaatttttttaaagactttcatccaactcgtcaagttcctacaatagaacagttaaaaaaaaaaagacatcatcacctcacaaccatgggggagttaaaacaattactgagggggaggagatgaaacgtttatgaataagactgtctgcagttacttgagctgctaagattaaatgacaataggagttgttgttctttcaaggcataaactgaccttctgttgaggaaagttcactgctttgcyactgtgtcctatgttagattaaaaggggtggggggagcagcggtgcagcttccctcgcacagtagttgtgattaaagcttttctggatcatttctgaagaagggtaaaggctttcagattgtcttgcctgaagacaagaaagcagaggtaagatataactcctgttacttaaacggaggaaaaaaaacatggggaagtggactggaattgcaacagcaagagtttgttgtggttcttgtttgtttttaccttttaaatttgtgaaatacagcatatatatacagaaacatgaataaaacgtaaatgtataatgaaattattggaaagcaaacatatgtagccactacccaagtcaagagctagaacatcaccggtacccaaaagatttcttcccagtcaaaactcccacctttctccctagaagtgattaaccacaattttgtctttttttttttttttttttttttgagacggtgtcttgctctgtctccaggctggagtgcaatggcacaatcttggctcactgcaacctccgactccctgcttcaagcgtttctaccacgtcagcctccccagtagctgggactacaggcacacgccaccatgcccagctaattttttgtacttttagtagagatggggtttcactatgttggccaggatggtctcgatcccctgacctcgtgatccgcccacctcggcctcccaaagtgctgggattacaggcatgagccactgcgcccggcctcattttgtcttttatgcagagcatactatagtttggttttgcctggcttgggactttctgtaagtgggatcatatagtatacatatggcttttcccactcagtatcatatttagataattagctaccttgttgcatgcgtagatctttcatttttgttgctgtattgtattccatcatgggcatatgccaccatttatccattttacttttgatggacatttgggttgtttccagtttgggggctattadttacaaataatgcaaccatgaacttcttggggtttaccattacctttctagataatggtaaactggtttcctgtagtgactaagagctgctctgcatccttgctgccacctggtctaatcagatggctaatgctgtctgtctggtgaatggacagtagctcactgtagctatactgtgcatttctctgatgtgatggggttgagaaccttttcatatgtttgatattttttatctcctgtgaagttgtctttcgattgtttttgcccattgttatacctactgaggggtctgttattctttcaactaaccagccctctgaaggcgaatataaggatacaaaacatgcttcctgcccccgaggagatgacttgacaattctagaggcagatatatgaacaagaagtacatgataattgtgattactgaggcatccatcttccctagcagactagctaaaggatggcgctcttatttgtgtcatatcctgggtgcttaacacagtatctgccacataattaggtgcttagtaaagttttgttaaatgatcgaatggggcgtttttagcgcagtgtgcaagtgccctattaggggtaggcgcccagtaactcgagaagcatggagtargaaaccacaaacagcacctgctccccctcctctccccctacctgctgtggggaaggcctcccttgtaaatttgaaaggttgattcacgggaagccgtggaggaggtgcatgctaggccaacgaatagaatgtgcaaaggcccagaaggaagacagagcccagcctgcaagggaatgttaatttggagtgactaacaccatgaaagggcatcagctggagatactgctataaagggactgccttgtaatttcataagcatgggggtaaaattaagattaaacacagggaaagaacattctcacaggtgaggatggtgttgaaccctagaataatcgtttcccagataccttgaacaaaaatcsagcagttagagaagcctgaccatgaagcaaatttgacttttgtccctctagataacaaaagttatctttttgaaagtaatggtgtaatttgaatgagtgtagagaagcgctgaagactgagctttactaaagccttcagacctggatttggcagcagcgtggccttagtcaagcctcggtttctacacctgcaaagtgggaataatgcctaccttggagggctgttgtgaagattaagggagataatacatgtaaagtacttaaccatttgcctggtggggtagtttttatgacctagatcctaaattgttcactgctgctgttgctactcttggtactttttactggctggcatctgcttgcttaagtttataacatagtaggagcattaacaaggtcccacggtggggaccttggtcgtttgacgagatctgcgctcccgcccatcccctcccccccccctccacattggagacgcggccaccaccgcgctggcgcggagagagggaggaccgggcgtcatgctgtttctggcctgaggttttgtgtgcctttgttttccttttgctctattcgtgtattcctgcctacggcctgtgcggggaattaggagctcagtactgaaacggcggttttcctaaacagtaccggacgggcgcgggggctgacgcctgtaatcccaacactttgggaggccgaggtgggcggatctcttgaagccgggagttcgagaccaccctggctaacgtggtgaaaccctgttcttactaaaaatacaaaaaaaaaaaaaaaaaaaaaagccaggagtgatggcgctcgcctgtaatcccagctactccgtaggctgaggcaggagaatcgcttgaacccggsgggcagaggttgcagtgagccgagattgcgccattgcactccagcctgggcaaaaagagcgagactccgcctcaaaaaaaaaaaaaaaagtaccttccgtagttctcatgcagcggaggggttcgacttgtaaccggcctgaaaccaagcgtggcgcaagatttgctcaagcccctcctcttggccaaactttccggaggggaaggctttccgaggaaacgaaagcgaaattgaaccggagccatcttgggcccggcgcgcagacccgcggagtttcccgtgccgacgccccggggccacttccagtgcggagtagcggaggcgtgggggcctcgaggggctggcgcggcccagcggtcgggccagggtcgtgccgccggcgggtcgggccgggcaatgcctcgcgggcgcaatgaatccgcggcaggtaagccggkccggccttggaccttcgccgccgtctgggttcgtttacaacctcacaggctttgtgttgcagtgcgtagcgtgtgcgtcttgtgagtgttagaktgtgtgtgtgtgtgtcgtcttgccaagcagcattgctggtttaggaatttgtgcgtcttgtgagtgtgtgtgtgtgggtgtgtgtcgtcttgccaagcagcattgctggtttaggaatttgtgcgtcttgtgagagtgtgtgtgtgtgtgtgtgcgtgtgtgtgtagtcttgccaagcagcattgctggtttaggaatttgtgaatttgtatcctgctcattaattctgcagaatggagcagtgcgtgaagagggcttgggggaaaatgcgcccccgtctgagtaggaaggcctgagcccatgtcaaggcagacacatcgtctccctttctgctagggccccttgtggaaccccctacccccgctttagccccacttgaacaacgttcggactttgagcagcgcacactatcctcagctcaccttatccacctcctgaaggccttctgggagttaaaaatggcacttaagctgtaggagaaagcttgttaaccactttatagctaaaaactgggaaaacacaaatggccttcagcaggttaacagataaactgaaatacatccacataatgggatactgcttagtagtgaagaggaaatactgttacaagtaacaacacgggtgactcgcaagtgcgttatgctaagcacgagaagccagactcaaaaggctgcatactgtatgagtccatttatatgacattctggaaaaaaaaaaccacagttatagsgatggaaagtggatccgtgggtgccagggactgggtatcgtggaagaaattgattgttgagtggcatgaaaaagctttttagggaaatagaaatgttctrtatcttgattgtggtggcgattgtcgaaattcatagatttatacacttaaaaggataaattttactgtatctaaattatatacctcaattttgttaagatatatatatatwtttttttttttttaagcactcctttgaaaggattaaggacgcctaacttgaaggaaaagcatttctgcacaggtgtcagtgtattgcactgtggaacctgtgtggtaaaggcaaagggggtagtgcttatctcttgatcctaaatatgtgagaccagattaaagtgaaatctgggaggcaatgaatgttaaatgagttgttatgtaatttgcatagaggtgatgctgagagatttagaaaggatcactgtgggttgcttgctcactttcttgctctcctattccgtagctttccaaatggctgtactcaacggtggcttggtgtttaggggatttaaggggggcaaaaagaaagattaataatctcctcctctccctctaaccctactgccctaagatatccttagcaaacttacatctcctttcttttctctgtgttcattccattgtgcgcacacatacacattcatggattttctctttttgtttagggaaaaaaattataatgtacatactattctacaactttttgttgttttattgaacattatatgattcctaaattatccccaggtgaatacaaatagatatgacacattttaaaaaaataaaataactggccgggcgtggtagctcatgcctgtaatcccagcactttgggaggccgaggagggcggatcaggagatcgacaccatcctggccagcatggtgaaaccccatctctactaaaaatacaaaaattagctgggtgtggtggcgtgcgcctgtaatcccagctactccggaggctgaggcaggagaatcacttgaacccgggaggcggagattgcagtgagctgagatcacactgcactccagcctgattgcagtgagccgagatcakgccactgcactccagcttggcaacagagcgagactccgtctcacaagaaaaaaaataaccgtgtgagtactattccatagaatgaatgtttcataatttaattcttctatagacagacattaaaatattttccagatttgggccaagagtagcagtttaaaaaacatttagcttttaactgactttagccactttgaaacacaatttttttttcccaaggtcactcaaagagctaataggagaacccctaagtcccataattcagctctgggagccagcactcactctgtacacacatttgcctctgtccctagcaatatggtgggcgtgagggtgcagcaagaggaacaagaaagaaatgattgcttgcatagtggcgtcttgttcatgcagtcattaattcaacaaatgtttgttgagaatcagctttgtgccaagtgctagagaggttgagatgattgaagcatagtccttgacccccaagagctcaccatggaatcaactgaagcccctcatcagtactgtgttgggaatattgagagtggagagttgagtataacttataggacacctaatgttaattacctttcagacactgcaatgtgtgtgtgccataaaaaaaaaaaaaatccagtagctctgatacgagggaaagtaaatggtttaacaggtgctgagtaggagaagctcaaggagaggaaaccccaagggctgaagaaggtgggagtcaggagtctcctgaagcaagtggcatttaaggagctctataaggaaagggtcagagttgtgataggtggctgtggagggagatgtgccacctggattggcatgtagagggatagaaagattataggcctttgcaatggcccagtaagaggtaatgaggggctggaactggaagaaaacacatttaagacacagtacagaggtggcagacaaggtgggacttggcaactacctgatgagatccaggagatgaggccaggaggcgggcagcaaagatgacgcaggtttctagccttaatargctaggaggagagtgatgccattagcaataagaactacaggagaaggagctgagtttgagggaactattaatttggttcagaatatgtgctgtttgagttatggcaggatatttaagtggacagactgtcgacatagttggaaattcagatcttaagctcccacacaaggtagtggctggacatagtagatttgagtgctcttgcttcagagggctagtttaggttggggcagtgattaaagcaacctaggaaataaattataaaggaagaagaggtccttaaaaccttggagactgattatataaagggtggatccgttaatacagtagctattaaaaaattataaggggtgggaaaaagggacaaagaagaaaaaagaggtgaaagacctttgctgtgtcaccaaaccctgggaggagaattttttaaaagaagagtactcaatccacagtgaactamggcatgtttgttaaacacaattgaccaccacacagcgaagacccaamtgaggttcaagagaaggaatttttatggaccctgttagcacaagtcaaggtccttctccagtaccactgggaagctttggagaagaaaagggggacagtgggccttgggtggagaagggaactgaccatgagatccaggtggggtgaggaggtgtgtgaagtcagagtggggaagaatcagggtggcttactggcagcttcaccggggtcatgcgaggagcaggttccaccagagtaaggagtgaagttgtagaaacacagggaagtcaccatcagaaaagagcaggagtcaagaaactatggcccacaggtacaaactacctgtttttataaataaagcttcatggtaaatgaattgtaaataaagttttgcatattgtgtgaggctgtttttgtgctacagtggcagagctgtctggccctttatagaaaaagtttatcagccactggaaaagagttgcaggatttgaggtcttggtgtgatggcctaggttagagtcatagtgagattgaaggagtagctagacaagccaattgtgtggcagaaaggtagggatggagatcactgggttaaggatccttgtagccaggacaccatgagagtgattgacaagaatgctgaaatcccctaagtgtgtcaggatgtggaagagtagaaggctagagttatggaagaaagggtcccacctctacctgtgcagcctccaggagagtctgaggagggggcggtgagtgtgagtaaatgttgtcagaatccctcctcccagtctacaagccccagggaaaggaagcaaggtgtttactgacacccccaggcttataagtacttcctggctccatcaccctccagtgaacagccctggggagaagacagtactggtttgcaggtgggtgggtggggaaaggggtcacaggtgcttggtgttctggtaaatgtgcatatgagaacatggggttgcttgtgccctgtccgtcagggttcagaagaacgtgcagtggaagcagctatggggaagtagctagggaaggtaggactggtctgaggtggtgaggagcagatgctgccagctccacacatccaggagagcctgggtggtttgggcaaaagtctctggcatcccttctgagcctgggtaccacactgaagagtgaggacagtgtgccatttttatcaggaaaccctccagctccctgaagaccaaattctgatcctcctgggatggcagtgaagagccacagagatgactctgaggtcccgtggccttttcccacctggagattgttttcgttactgcgctgttacagccttggaggactggggttcagtttcatccaatcacatttcttcttttgtcatagtcatctaaacgatagatcttagagacaggtgggcarggggtgcactggtgagcctgacttaaggagaggtcatctcgtcccttccctagtcccatctcccttggttattgttatttcatgtgattgttctggttatttcaggttattctgtttttgttttcaaaacaataacatatatttgttgttctgattttaaaggggtaattgttttggtaactagaaaattaccttctcaactcccttaaattctgtcaaagggaaaagtaagttaggttgctggagaggctatgctgaggcctcagaacctctgtaytcctggaagttctgygtgctktgcctcctgctcccctctctgtgttcctgttggcaggcccctaggcaggatttaggaggtaggcaagtcaccctagccaagtyataagcccatggctcaattgccttctcagcccttcaagggctgttccacaggcagcaaagggaggggcctccacaggttcaccactgcagccctaattcattttctttttccactgtcttattctgcaggggtattccctcagcggatactacacccatccatttcaaggctatgagcacagacagctcagrtaccagcagcctgggccaggatcttcccccagtagtttcctgcttaagcaaatagaatttctcaaggggcagctcccagaagcaccggtgattggaaagcagacaccgtcactrccaccttccctcccaggactccggccaaggtttccagtactacttgcctccagtaccagaggcaggcaagtggacatcaggggtgtccccaggggcgtgcatctcrgaagtcaggggctccagagagggttccagcatccttcaccacgtggcaggagtctgccacagagaggtgttgattgcctttcctcacatttccaggaactgagtatctaccaagatcaggaacaaaggatcttaaagttcctggaagagcttggggaagggaaggccaccacagcacatgatctgtctgggaaacttgggactccgaagaaagaaatcaatcgagttttatactccctggcaaagaagggcaagctacagaaagaggcaggaacaccccctttgtggaaaatcgcggtctccactcaggcttggaaccagcacagcggagtggtaagaccagacggtcatagccaaggagccccaaactcagacccgagtttggaaccggaagacagaaactccacatctgtctcagaagatcttcttgagccttttattgcagtctcagctcaggcttggaaccagcacagcggagtggtaagaccagacagtcatagccaaggatccccaaactcagacccaggtttggaacctgaagacagcaactccacatctgccttggaagatcctcttgagtttttagacatggccgagatcaaggagaaaatctgcgactatctcttcaatgtgtctgactcctctgccctgaatttggctaaaaatattggccttaccaaggcccgagatataaatgctgtgctawttgacatggaaaggcagggggatgtctatagacaagggacaacccctcccatatggcatttgacagacaagaagcgagagaggatgcaaatcaagagaaatacgaacagtgttcctgaaaccgctccagctgcaatccctgagaccanaagaaacgcagagttcctcacctgtaatatacccacatcaaatgcctcaaataacatggtaaccacagaaaaagtggagaatgggcaggaacctgtcataaagttagaaaacaggcaagaggccagaccagaaccagcaagactgaaaccacctgttcattacaatggcccctcaaaagcagggtatgttgactttgaaaatggccagtgggccacagatgacatcccagatgacttgaatagtatccgcgcagcaccaggtgagtttcgagccatcatggagatgccctccttctacagtcatggcttgccacggtgttcaccctacaagaaactgacagagtgccagctgaagaaccccatcagcgggctgttagaatatgcccagttcgctagtcaaacctgtgagttcaacatgatagagcagagtggaccaccccatgaacctcggtaagagaccacccaggaactgtacctagggttggggtcaggtgcttttgctcctgacgcagtcttggctgatttgtgagcagtgctgtttggtggcrcctatcttttcctccttcccttctgccttttagctaaattccccttgattggccctttctccagatattgagcagggaatatagaccttggaccagccagaatcttggctgaacaagggggaggttgactctgttggctgtaatgaagcttctttagaaatgattggttttggccgtacgcggtggctcatgcctgtaatcccagcactttttgaggccgaggcaggcatatcacgaggtcaggagtttgagaccagcctggccaacatggtgaaaccctgtctctactaaaaatacaaaaattagctgggcrtggtggcgtgcacctgtagtcccagctactcaggaagctgagacaggagaatcacttgaacccaggaggcagaggttgcagtgaactgagattgcgccactgcactccagcctgggccacagagcaagactccatctcaaaaaaaaaaaagaaagaaatgattggtcttgggggccggggcggtggcttacgactgtaatcccagcactttgggaggccaaggcaggcagatcatgaggtgaggaattcgagaccagcctggccaacatggtgaaaccccatctctactaaaaatacaaaaattagctgggggtggtggtgcttgcctgtaatcccagctactcgggaggctgaggcaggagaatcacttgaacccaggaggtggaggttgtagtgagccgagattggcgccactgcactccagcctgggcgacagagtgagactccatcttggaaaaagaaagaaaaaagaaaaacatgattgatctccatgcatcaatatcatgcctgcctcctaaggcagaggtaatgaagacttaattcccttctgtaggccttcccctcctccctaagccgttttctgagagaggtgcaggagcaggtgggttggggcaggctgcatacacagtgggggtgggttgtgctgctaarcagcagcaggtccacaatcccccctctgcatagctcctggggggaaaggatggaggagcgtgtgcacggctgcctgcctgttgaaggtggtggttctaattttataaacctcctctgcacagatgggtaggctagcacttgctgccactcctgagctgtgaagtcagcswttacctcactcagatagctggtcaggccctgcactgtaggtcctaataggccagtgracagattgaggaaaacaggagcttctgaagggcataacagagagcaaaaccactgaagctgagtggctgcagctgcagccagggaaagagccagtaggatgggggagaattccactgacctttatgtttacctagcctggtttctaggggtgtagattcctggctagggcccttattccttgtcttgactgtcttcatgacaccaatttggcatttcaggagagcggttaagaaaaggagttgtgtctgtccaaaagctggcaaggccagagctggattgtttggggtagagactggatggccgtcattctcttttgcctccatccctcctccccagagttggaggaaagcagtggattttgtggttagtcattctttggactcacactaaaagaaacattrgtgccatgttcaaatatatcagaagacctaggaaataagaaatttgacctacttttctaaatgaaatcccagactgagcaaagagctcaccacatttgaaagcttgaacaaagggggcctaggctaagtccagaggcctagaacaaatgcttttttattttctacataacaaggggaaattccttgttatgtagaaaatagctggagacaaatggtgctatagagtgactcataacaaactacggtgatataggtctagggacaaaagcaggccactgataagtggcagatgcctgatccccctaggtagtggggagtgtgagactgggttataagaagccttcactatcttttaggaccctcccttgaggaggccagtctaccacaattgctttagaatgaaggtcttttggttgctcacaagactataatggtaatttttggctcatcatttttgtgtgtgtgggttttatcttaattcattgttaaagagatagtgggtttcccmtgagctagtttcctatcatctgtgcctatgtttgcttcactgagctatggggaaagagtcactggctgctttgtttacaaaaagaaaggacaggctgagccttaaggagtaggaaggagttccttggcctacccttcatctcctccacaagtgaaaagccccttagcgtagcagaaaattccaggttgaaggtctctttggagaaggcagaaggagtgacctagactcctgttcacacatctaatcactttccgtcaagatttaaattccaggttgtcatcaatggccgagagtttcccccagctgaagctggaagcaagaaagtggccaagcaggatgcagctatgaaagccatgacaattctgctagaggaagccaaagccaaggacagtggaaaatcagaagaatcatcccactrttccacagagaaagaatcagagaaggtaggtgtcctcctgccatctgggaggatcagttccctgtcagtgtctggattgtaactgactcccttgaggcaatcccagcctaaacaactgacaccatctcggagtcagcttcccactcttccctctaccctatctcgccagcccacctttcctcctctcatacccagctcctctgtctgctcytgtcccaacataattggatttacagaatttcggacttgaaagagacctgaaagtttattgaggccaatctcctctcttggaagatgcggaatgagagctccagcagcccctttaactttgggaagccaaccccttgacaggtggtgggaataaagtcccccatccccatcccttcttctgtgatggactaaccagtgttttcttagttttgttttcttcttgtctctcattttctctagactgcagagtcccagacccccaccccttcagccacatccttcttttstgggaagagccccgtcaccacactgcttgagtgtatgcacaaattggggaactcctgcgaattccgtctcctgtccaaagaaggccctgcccatgaacccaagtatgtcctacgtgtcctctgtccagctgaggttttctcagaaagaaaaagagacacattttcttccttgcctcctcagggatggcagattgaccaatttctcctgtttcaaaatggggaaaggagggctctgaggtcctggttgctgcttgtgaggcagacaattagggattaggaattcaaagggaattcctggcccaccctctatctcctctataagcactagggaggttcacggcttggaggtcactcactgttggtgggacagaaaggtacaggacctgagaagctctctgcctgtgggtctatagactcacatgttcaagagaagtgttcctggaagaggtgaaactaggttgatgcttaaatgttgaaaggggtcagccaggctaagagacactggctgttcaaggcagaagtgactgcatgagatgtgactgcacagaggtgatgtgttcaaggaaattaccagtagtggaggatggcagcctggcagaggctaggtcaggctcctcagtcaaaaccattttaatccttctacgtgcttcatctcctgtcaggttccaatactgtgttgcagtgggagcccaaactttccccagtgtgagtgctcccagcaagaaagtggcaaagcagatggccgcagaggaagccatgaaggccctgcatggggaggcgaccaactccatggcttctgataaccaggtagggcgttttcctactcaaaagatacaggtcatttttagcaactgagtggtttaagattgccagtgactccctcaacatttcctgaagtgtttatggctcctctgtttgatggattctcctttagyctgaaggtatgatctcagagtcacttgataacttggaatccatgatgcccaacaaggtcaggaagattggcgagctygtgagatacctgaacaccaaccctgtgggtggccttttggagtacgcccgctcccatggctttgctgctgaattcaagttggtcgaccagtccggacctcctcacgagcccaagtgagtgtcctagtcctggctaatgcatgtgtcaccagttggggatggtctgtaacccagggaaaacaagggtgtgctttagctgtgtaggacagaaggggcgagttgagggaaacaagtccagccctgtctccacggcctcttagaagacaatagacctgccaagagtgaatgcgttcactcttccagtaagcatgatcctttttaattttttgactagttttaatttttaaagaaatgtataggtacattaaaaaatcattcaggccagacatggtggctcacgcctgtaatcccagcactttgggaagttgaggcaggtagattacctgaggtcaggagttcaagaccagccggaccatatgaggaaaccctgtctctactaaaaatacaaaaattagctgggcgtggcagcgggtgcctgtaatcccagctactcgggaggctgagacaggagaattgattgaagctgggaggcggaggttgcagtgagctgagatcgcaccactgcactccagcctgagcaacagagcaagactccatcttgaaaaaaatcattcaagctgattgaaaaagtagtcatttcaatgaaaagtctcatttccgtctcagacttcyagtttccctccctagacccatatattactatagccctgcattagcaactgggatgcggtctgagaagcatggttttgttgttgtgagaacatcagtgtgtatttacataaacctagatggcatgggctcctacacacgtacaggctgtatggtatggccggttgctcytaggctacaaacctgtacagcatgtaactgtagtgaatactgtgggcagctgcaacacactggtaagtattggtgtctatctaaacagcaaaaagatacagtaaaaagacagcataaaggattaaaaaaatactacacctgtatagggcgcctgccatgaatggagcttgcaggactagaagttgctgtgggtgagtcagccagtgagtggagaatgaatatgagggcctaggacatgactgtacactaatgtaggctttgtaaacactgttcacttaggctaactacatttatttaaaatatttttctttaataaattaaccttagcttactgtaacttttttactttatttttactttattttttactttattaacttttttattttttgttccttttgtaataatacktagcttaaaacacaaacatgttgtactgctatccaaaaatatttcctttgtttatatccttaattctatagtcttttttctgtttgtaaatttttttatttttttaactttttaaacttttttgttgaaagctaagatgaaaatacattagctgttagcctaggcctacacagggtcaggatcctcagtatcactgtcttccacctccacgtcttgtcccactgtaaggtgttcaggggcaataacatgcatgggggccgtcatctcctatggtaacagtgctttctggaatacctgcctgaggctttttttagttacttatttttctagaagtagaaggagtatacgctgaaataatgataaaaatatagtaaacacataaggagygtgtagcytagatccctcgcattcacagttcacagtcgagttcacactcctacaagaatctcatgctgctgctgatcccacaggaggcggagctcggaccagaatgctttcttgctcgccactcacctcttcctgtgtgcccaggttcctaacaggttacagagccctgcacttggtgataagaatttttcagctccatcataatcttacggggcccctgtcatatgtgtgatttatcattgaacaaaacactgttatgcagtacatgactataccagtttcttgagtccttctagaaattgctgtgcataactagcacattttcccttttgtctttttaaacaartatatcttctgttttatacgttgactcctttacttaccagacttcttgcatagctgcatagtatttcattgaatagaagctgacaaattcagtttctcagaagtaaacatttaatagggacttaggaacagaaatgatgtcttgggtggctgcaagatggtggatccctgcacttaccctccagaaagtatgctttctatagaggcttttttggttaaacatgcagctggtcacacattatactttcttgtgaaacttatgagcactagctggtggggaggcttggtagacatctttgtgtggaattatttatgctacccaacactttgggatgcgggagtcagatattggtggtcatagtggttttgcatcaagatggcatcactcttgccatgcaacmggcatgttttcttaatctctaaggtctatcacaaagtggaaaagcaaggtgtaaagtgaggggagaggtgaagattgtctgtatatgtctagaatattttcttgaaggatcgaaaaaactggcaactgtgtttgcttctggggaaggagggacacttttattgtacactcttaactgtttgaattttcacatgtttggcatccaacttgtccattttaaagtcattaaggaaaaaagcttataaaaatgctatcttgttactttaaatttgtctctccttaatagaagtaatgtcagccgggcgcagtggcttacgcctataatcccagcactttgggaggccgaggtgggtggatcatttgagctcagtaatttgagaccagcctggccaacatggtaaaaccccatctctactaaaaatacaaaaaatagctgagcatggtggtatgcccctgtatgccagctactccggaggctgagcaggagaattacttgaacccaggaggcggaagttgcagtgacctgagattgtgccactgcactccagcctgggtgatggagtgagactccgtctcaaaaaaaaaaacaaaaaaatcagaagtaatggcatttcatttattcatatttatgtgttatttgcatttccttttctgtgaaccacctgttcttgtccttttccagttttctttcagattgttactctcatggatatgtaagaacttttaacataatttttaaaagtagccctttgcccaacatgacccaatttagaacacacatctgcccactgtttaagccatctggaaaaggagaggcccagtctccctccagctgctcttctactaattcatatccttcatctcaataagcacctccttatctttaagcacagtccttcagatgataggttcagtgcatttcctctttctcttctgtgaaatcttctgtgaaatcctttctaggacttcaagtcagccattcattgagaatgtaagaacttactatgaactagatggaagatacaaaaaattgctgcccctgagtgtgtagcagacatatagccatagcagtattgaaatgtgccattggaggtgaatgcagagtgctgtggggacacagaggacactgctgccactgtctgccagggagctgaggaaggttgcatagagaggggaaatgctaattgagtaactacgtttattaactatctcgtacaataatatactttagttgcttcttaatgtgaattatgctgggtctttttttcctttctgtctactgtggctggtgacgttaactaattttatgacttcttttctgttttttttttttttttttttggagatggagtctcactctgtcacccaggstggagtgcagtggcgcagtctcagctcactgcaacctccgcctcctgggttcaaacaattctcttgcctcagctcctcgagtagctgggattacaggcatctgccaccacatctgactatttttgtatttttagtagagacagagtttcaccatgttggccaggctggtcttcaactcctgacctcagatgatccacccgcctcagcctcccaaagtgctgggattacaggcatgaaccaccgcgacagccatgacytttaatatctaaatgctggagaccactcagagctcccgattcctccatctagttgcttacttgtcacctctgtttggattaacatccctaatatgacatgtccaaagcagaactcttgggttttgcccccttcgcttcatttcccccaagtctttcccagcttagtaagtgataccactgtctacccagtggctcaagtcagaaacctgaggatcatcttttcctctatctcctttacctccttcgtcaactcatccttaagtcctattggttatacttagaatttctatcccaaatcccttcctcttctttccacctccagcgtcagcactctaatccaagccactgtctcatctagactgtcacaatagcctcctaactgatctttmtactttatttactcaacacttatttatggagtatcttctattttttttagaacaggaaccaaacattaaccaatagtcacctaaagaaatgtaagatctcatatttgataagtattccaaagggctggagttgcagcgagaatcaattatagcacagtttgacttaggaaggagagggggaagggcttccccaagaagtactgcctgagctgagactttaaggwtgatgaagagagaaagactgagggttctaggcgaaggacactgttaaatcctgtggtgggagaagcgcagagctggcaaagaggctgagaggaggcacttatggcaatagccccatttggctagtggctaccatattggatagcacagctctaaaggattctagttgcataattaacaaactttatcatatatgtaaatatatcagtataaaactttgcacgtaagagttcatattcttttcaaacacatggggcagtcatgaaattctcctggatccctgaggtaaagatactrcacaatctgtccctcctgaccgccttcaccatcttcttttcatgccactgtccctctcattctgaacttaagcccactggcctgcacgggcctgccagcatggacaaagaaaagagtgaaggcatttagttgcttcggatcatcaaggaacagtgagaaactccatgtggttgaacataaacgttgattccttttactgcctgagctgctaagtcttgaaactgaagcctctgttatatgcagttagagtatccaaagctgggttctcagccagtrgattaggatctggttgaaagctaggattcttgatgccttgtctggtacatttccaagctgttttgctccaccatgctcttccctctgtgtttggaaattaccagccggagcggtagaagccacctccctgctccacttgggcactttattgtcagcgcagctcatgcgcccaagatccattccttaccccagagttagcttaagcctgccaggagtcaaaaaaacaactcccagcaaaacctgggtccctggcctaaggccgaccttgacctaatgacctctccaggtcaagtccccttgagctaataggaagtaaatgagggaatggagttgggcgctttaaaaatcagacagtgtatgaagtaacagtgacttgtggggagaaaggtagtcccttctgatttctgcttaagaagagagtccaagttggtgctagcatttcgttaagccttcctcatacttcataatcttcctttatagtaaggacaggctcagagcctttgcaggtaacagtatctagtcagaattttataacatgattttatcatattctgttttacagccaccttcaatatgtggcaagtgatactggttttccatttacagtagtgaaacaaagtttcctatttcagtgtgtttacatttttatctcttttttcatacctagtattacggatatttacatttttagagtctgtttgtttattttagagatggggatcttgctgtctcgcgcaggctggagtgcagtgatatggtcatagctcactgcagccttgacctccagggctcaagtgatcctctcaccccagcctcccaagtagctgagactataggcacagaccaccgtgcccagctaaatttttttttttttttttaagagacaggggtctcgctatgttgcctgggggattactatgttgcccaggctggtcttgaactcctggcctcaagtgatctcccaccttarctcctcaagttgctgggattacaggtgtgagccacaatggctggctctaagaagtcaatttagagaaaaatattaattaatagtccaagtaatacctggatgtggcacaaatcatgtggtgattcatgaatgaccaaaatctaggaaatgctgccttagaaacagcttctgtttgacgggtccatatgtttgcaagactggccacatcttcagcaaaactaacccttccttggaacaatgtcagggtctggcacttgtcttcattctctgtttctcatcccaaaggttcgtttaccaagcaaaagttgggggtcgctggttcccagccgtctgcgcacacagcaagaagcaaggcaagcaggaagcagcagatgcggctctccgtgtcttgattggggagaacgagaaggcagaacgcatgggtttcacagaggtaaccccagtgacaggggccagtctcagaagaactatgctcctcctctcaaggtccccagaagcacagccaaagacagttaagacgtctacttttggtgccttttttggggggggggggtcctcctaactcctaagtggaggtggctcttgctgtcatgcgagttattcctaggctttactcttagcctcgagagagcagtaactgggacactagatgtaagaaggaaaagatgactcacacgacaagtagagcttgatctccctgcccacggtgaatatggtggacacagcctcagctttgtggtgctgacacagcctcttttccccacagctccctctcactggcagcaccttccatgaccagatagccatgctgagccaccggtgcttcaacactctgactaacagcttccagccctccttgctcggccgcaagattctggccgccatcattatgaaaaaagactctgaggacatgggtgtcgtcgtcagcttgggaacaggtgagtgaggctctgagacmtgccgcctcccatggcgcctgaaagcgggtgcctctcatcctcccctggagtccatgcatgtaagtccaaggcagggagaagagacttcattttagctacagtcaattcagagtgaggaatgagttcttagttcctagaggagagaatatgggagtctaggatctgagaaactgaggctgtttctgccttgaagctttcagaacaaatagccttcatcctgttttccatcggtttccttccattattctatttctgttttaaacaccttcctagggaatcgctgtgtraaaggagattctctcagcctaaaaggagaaactgtcaatgactgccatgcagaaataatctcccggagaggcttcatcaggtgagcgaggtcagagctgtggcccggctgcccggctgtggagagctccagttccctgccccacatggctctgacacggcctctgaatccccctcagacagacgggtcatgatgtggcagtggcagcctttgcttttcacccgtccatttgaacctgtctgatggaatccatcccctctgtgasctgagctgcctcccactgctcggcctgtttttaaatgctgtccttttttctgctaactctgctgcttcatgttcttttctaaaaacacaaaatgaccttttagtcctcagggccttgaggatgaggcagctttccatttccgtttgaggacctacacaaccttgatgcccctgccagctttctcctctagctcaccttttctttaatttatgaagggagagacttagaaaggagcaacagcttcctgtagtccttgaatcagtttgctctgctctagaatccctgtagccgccatagcgaggagccctcagcagaaatgaaggagacccaaaaggctaactatgctttatgaaatgctgaggtctcccctggagaatttccacctgataaactgtgaaaggtctgcaacattgagacttttccttactttctcatttggaggtcagattatagaaacaactgcttttcccagaattgaacctgccttcctaaccagactttctttttgtaggtttctctacagtgagttaatgaaatacaactcccagactgcgaaggatagtatatttgaacctgctaagggaggagaaaagctccaaataaaaaagactgtgtcattccatctgtatatcaggtctgtacagttcctgttgctgccagggtgggccctgccaggctgttagaattgggtatccaaatgctctcctggcctgtaaatcgaacctgatacaataagccacactccactgtgggtttgaggtccatattcaggtgtagatgactcacatgtactgctgtccacctccagtctcccatggtaggccttagaaaacatcccttgcttctgtcacatctgactgttttggagccccacgaaattgcagatttcccacaggtgagttttaacagccacccctgtttttcagcactgctccgtgtggagatggcgccctctttgacaagtcctgcagcgaccgtgctatggaaagcacagaatcccgccactaccctgtcttcgagaatcccaaacaaggaaagctccgcaccaaggtggagaacggtgagtgatacatgcccccgcctcctttcctcaaaaggctctgcaaggtccagggaccccaagtctctacaaggctgctaggattttaccattagtcactgggcacagaggtgctgtttacaggaaaggraagacctgggtcagggagctgtgtggtaagatcagggttctattttgaatgtgttagtttgggagatctgggagatccccaagtcaaataggaggtgggggttcccatgtggagctcagaggagggagcttggctggaaatagaaatatgggagtcatccccctatagggtcttcatggccatgagaatgcataggattacctcaagaaagcggggaggaaatgaagagtgcggcacaaccaagccctgaggagttgacagatgaggatgccaaatgctggggtcccctcctgtctagctggcagttgactctgccttgtccactggctccttctctcctatcctctcctgtctccttactgtctcttcgcatccactccattgcgttcaggccacgtcagcagtcatcatggtggtcctgaaaccttgctaaataccctaaagtatagacacagttaccatggagccggtgctccactcctaggtatatgctgcagagagatggagatctgtgtccacacggaaactaatatgtgaatgttcatggcagcattactcacaagagccaaaaaagtggaaacaacccagacgtccatcagctgatggattcataaataaaacatcaaatatatccataaattgaatattattttggccataaaaagaagtgaagtgytgatacatgcttacaatatggatgcacttgaaaacttgatgccaaatgaaaaaagccagtcacaaaagatcacatattgtatgattccatttatatgaaatgtccagaatagacaaatccatagagacagaaagtagatgagtggttgccagggccaggagtgggagagttggagagatgaggagtgactgcgccartgggtagaaggtttctttttggagcgatgaaatgttctaaaattgactgtggtgacagttgcagaactctgtgaatatactaaaaatgactgaattgtatgctttaaatgggtgaactgtatggcatatgaactatatctcagtaaagcatttttttttgtttttttttaaacccgatagtggtttcccactgcactgcatatacaagcaaaacctgctgtgatcacccggcctcctctcatgccactttccccatccctcgcatatgctctgtccacactggctctctgtcaggcgcctgaacagccaatccgctggctgccttggggcctttgcttttgtcctgtgtgcctgaaacacttactccagctgtcctcctccatgtctgggctcccctgctgctgctgtcccaggaggtgtcccctgtggtcctccgtcatagctgcctcagagccttcagagcactgtcagcatctggaattcttccgtatgtactggctactggtttagtgtctattctcttccctttcaatctcctcaccaccatagatgttttaagagsacaaagatcttacttggttttgctcaccgttctttcccagcaccaagcatagtgcctggcgcatagcaggggctgtgaaatatgtraagaatgaatgaatgtagcctgtggcccaagcttaaggaggatagaaaccacgccagggagtggtttggtccattggcgcctgtgggtctgacccaagtctctcacacaggagaaggcacaatccctgtggaatccagtgacattgtgcctacgtgggatggcattcggctcggggagagactccgtaccatgtcctgtagtgacaaaatcctacgctggaacgtgctgggcctgcaaggggcactgttgacccacttcctgcagcccatttatctcaaatctgtcacattgggtaaggggcctgccttgggatctggaactggtctgtccttcttgtgcccagatcccaaactgcatgctttattgccaggtgttttgtctcccttatcaaagtgagcatgattcactcctcagtaattgattgagtgtccagtctgctgtggtaggaagatcctggtagccccagtcagaaggtgcttcctaacaaggcagctgtttctctttcttgacaactatatcttgtacctccaaaatccccacatgcttctgcctcttaacagcatttggtgcaaacacaggtatatatgtttctcttttttgtactcaggttaccttttcagccaagggcatctgacccgtgctatttgctgtcgtgtgacaagagatgggagtgcatttgaggatggactacgacatccctttattgtcaaccaccccaaggtgctataacccccttctattttccctgacattttcctccttttcaagcagtcatgtaaacagaggaaaaatgtacactgtgggcaaggggaacattgcccacagtggtagcccacaagggaacattgcccacagtggcccaccaccaacattggttggtctcccaagaacttaaactttcttccttttggatgccaagggcttttcttctcttagtctggaattaatctgaatcgaggtggagttagtatgtctagagggtgctcagtcttagccaaacagaaccctaaatacaggggaaagatcatgaccccacacttcctctctcctatgagtcttgagtccctgcttcagaatcttattcctgaaaggtttccatctttctcccgttgcttctgggattcctaggttggcagagtcagcatatatgattccaaaaggcaatccgggaagactaaggagacaagcgtcaactggtgtctggctgatggctatgacctggagatcctggacggtaccagaggcactgtggatgggtaaggaracaggagagcgcagtgaggaccaagcctctgccctgacttgcaagggtgcatcatacctcygcagtctcagggcttgagagccgcctcccctcccacggtgtctccactgtgagctccttatcttacaggtcccaggtgaataatgagtgcttttgtttctctaggccacggaatgaattgtcccgggtctccaaaaagaacatttttcttctatttaagaagctctgctccttccgttaccgcagggatctactgagactctcctatggtgaggccaagaaagctgcccgtgactacgagacggccaagaactacttcaaaaaaggcctgaaggatatgggctatgggaactggattagcaaaccccaggaggaaaagaacttttatctctgcccagtatagtatgctccagtgacagatggattagggtgtgtcatactagggtgtgagagaggtaggtcgtagcattcctcatcacatggtcaggggatttttttttctcctttttttttytttttaagccataattggtgatactgaaaactttgggttcccatttatcctgctttctttgggattgctaggcaaggtctggccaggccccccttttttcccccaagtgaagaggcagaaacctaagaagttatcttttctttctacccaaagcatacatagtcactgagcacctgcggtccatttcctcttaaaagttttgttttgatttgtttccatttcctttccctttgtgtttgctacactgacctcttgcggtcttgattaggtttcagtcaactctggatcatgtcagggactgataatttcatttgtggattacgcagacccctctacttcccctctttcccttctgagattctttccttgtgatctgaatgtctccttttccccctcagagggcaaagaggtgaacataaaggatttggtgaaacatttgtaagggtaggagttgaaaactgcagttcccagtgccacggaagtgtgattggagcctgcagataatgcycagccatcctcccatcctgcactttagccagctgcagggcgggcaaggcaaggaaagctgcttccctggaagtgtatcactttctccggcagctgggaagtctagaaccagccagactgggttaagggagctgctcaagcaatagcagaggtttcacccggcaggatgacacagaccacttcccagggagcacgggcatgccttggaatattgccaagcttccagctgcctcttctcytaaagcattcctaggaatattttccccgccaatgctgggcgtacaccctagccaacgggacaaatcctagagggtataaaatcatctctgctcagataatcatgacttagcaagaataagggcaaaaaatcctgttggcttaacgtcactgttccaccyggtgtaatatctctcatgacagtgacaccaagggaagttgactaagtcacatgtaaattaggagtgttttaaagaatgccatagatgttgattcttaactgctacagataacctgtaattgagcagatttaaaattcaggcatacttttccatttatccaagtgctttcatttttccagatggcttcagaagtaggctcgtgggcagggcgcagacctgatctttmtagggttgacatagaaagcagtagttgtgggtgaaagggcaggttgtcttcaaactctgtgaggtagaatcctttgtctatacctccatgaacattgactcgtgtgttcagagcctttggcctctctgtggagtctggctctctggctcctgtgcattctttgaatagtcactcgtaaaaactgtcagtgcttgaarctgtttcctttactcatgttgaagggactttgttggcttttagagtgttggtcatgactccaagagcagagcagggaagagcccaagcatagacttggtgccgtggtgawggctgcagtccagttttgtgatgctgcttttacgtgtccctcgataacagtcagctagacacactcaggaggactactgaggctctgcgaccttcaggagctgagcctgcctctctcctttagatgacagaccttcatctgggaacgtgctgagccagcaccctcagatgatttccctccaaactgctgactaggtcatcctctgtctggtagagacattcacatctttgcttttattctrtgctctctgtacttttgaccaaaaattgaccaaagtaagaaaatgcaagttctaaaaatagactaaggatgcctttgcagaacaccaaagcatcccaaggaactggtagggaagtggcgcctgtctcctggagtggaagaggcctgctccctggctctgggtctgctgggggcacagtaaatcagtcttggcacccacatccagggcagagaggtctgtggttctcagcatcagaaggcagcgcagcccctctcctcttcaggctacagggttgtcacctgctgagtcctcaggttgtttggcctctctggtccatcttgggcattaggttctccagcagagctctggccagctgcctcttctttaactgggaacacaggctctcacaagatcagaacccccactcacccccaagatcttatctagcaagcctgtagtattcagtttctgttgtaggaagagagcgaggcatccctgaattccacgcatctgctggaaacgagccgtgtcagatcgcacatccctgcgcccccatgcccccatgcccctytgagtcacacaggacagaggaggcagagcttctgcccactgttatcttcactttctttgtccagtcttttktttttaataagcagtgaccctccctactcttctttttaatgatttttgtagttgatttgtctgaactgtggctactgtgcattccttgaataatcacttgtaaaaattgtcagtgcttgaagctgtttcctttactcacattgaagggacttcgttggttttttggagtyttggttgtgactccaagagcagagtgaggaagacccccaagcrtagactcgggtactgtgatgatggctgcagtccagttttatgattctgcttttatgtgtcccttgataacagtgacttaacaatatacattcctcataaataaaaaaaaaacaagaatctgaattcttagaaagttttaagtcctggtttcttgggggaggtgaaaatgggaacaaagggacctgtggccctggggtttctgataacagcaccagtggcatctgacatgaacctgtgggggacagggctgtccctcagcctttggaaaggagccatttcaaagaacctccctttgtgggtaaatttgcrtctgggtggggtggggttcatcaggcaccttttgattacgtacccagcagggcccttccccagcagagcccacgattgattgattgattgattgattgattgattgatttagagatggagtatcactctgtctctcaggctggagtgcagtggcgcgatctcggctcactgcaagctccgcctcccgggttcacgccattctcctgcctcagcctcccgagtagctgggactacaggcgcctgtcaccacgcctggctaatttttttgtatttttagtagagatggggtttcaccgtgttagccaggatggtctcaatctcctgacctcgtgagatccacctcagcctcccaaagtgctgggattacaggcgtgagccactgctcccagccagagcccactattaaatatcttgtcccacgggacttgagacgcaagatttcaaggcccagagtaggaaaacatcccttgagagaggatcacctattaggtacataattccagctctccttcaggggtgttttctacctcctccaaaccccactactaccagctgtttgacttccaggaatgtgcatatttggagtaaagttgcagccaggaccaggacaggcttggttgtagttttaggagacagaccattttctttttacatcatagatgacatccaaattatctctccatcttgaatttcagagagaatgtaccttttttcacattgtaatttacatcagaatttctagaagactcatcctggaccctttaataatatcataaccagaggatctaaagtacctaacagtgaggctaagttccaattaaacctgcctcatccattacacagaaggaacaactgaggctagaagggccagtgacatgttgtttgtgggcatatttcttgaggacctgaacaccacaacaccacaggtgtcattcattgcctactgagctacattgctgggtaagctgaagttggttttttgttttgttttgtttgagacgaagtttcgcttttgttgcccaaggtggagggcaatggcacgatcttggctcactgcaacctctgcctcccgggttcaagcgattctgcctcagcctcccgagtagctgggattacaggcatgcaccgccaccatggccagctaatgttttgtataccatgttggccagcccagtctcaaactcctgacctcaggtgatccacctgcctcagcctcccaaagtggtgggattacaggcgtgagccactgcacctggccaacacttttaagtggaaagacagtgaaggctgttgtctctgcctgctgtgatgtaccaggaaccttgagtgcctctgtcctctctgttctcagacagctccggttccacatggacagaaatgtagtgccaggtcttttgaaaagtggacagtttcctcagcctgaggcaagtgcccagccactttgtgtccagagggaacaacactgtcctcccacgacgctccctgagtgggctgggaagtagggctgccctgagggagcgcaagagggattttcttcagctcatttcagttgctgtctacctggcatttcatttagggggctcacaatttaatactgtttccaggatgtaggcccagatctgcaggtctggccttatgcaaactgcagccttgacttcccagagcacgggggctgtgagaggaaacccccgccatccccgcctcaggagagtggtcctcacctccgcccagccctttacaaaggactcccgggggccttttctggactctgcctactccaggcccagtcatttggccatttcttttccatctgagtgggtttgtaaagcagcaaatcacagtgattcggcagactgtcaccactcactttttctttggattcttgtgatgtctttaagctctcacgagtccagtttctccagcattctccctttttcctgtattcgccaacgctggcccccacgggctctctcccaacccccaaatagagtgacaagacaactttggaaacaactttctttacgagaatcttgagttcctaatgagtctgacctggagtaggctagaccagtgcaaatactccaggcgtgcagagcggggaggccaagggcagtgtggggaagatgggggcatcgagggtggctgagtgagtgtcctaatgattcctagacctacagtcccttaggaactgcgtggctatcacactgaccgcctggacctgttgggatgaatactaaaaggtggctgttcgctgtctagtcaaggtcggtgaatgggagtctggccagcactggttgggcggggagggatggtatgacacctgcctgactctgcccggaaacaagggggggacaactggaaccaggtctactctggcttggggagtgattcagagaaggctttgaatgccccttactttcctcccaaggagctcttctgcctgcctcagcggctatagcaagagtgtggactttggggttcaggcccagcactactcactagctgtcacttggtctttctgagccgcatttctgttacgtaggtggaggccccttcccataggattgtcacgcggaataaagacaacgcatgctgaggacctggcgcagagcagacccttagtaacaggagctaatactgggatacaaacagccccaggtccccaaaccatccaaagagccctccctgtttcctcttccgtttcaagaccattgggggaaacggtcttgcccttcctctgccgtagccttcctcagtagaacacaccacctgggggctgctgtgtcttgtttgcttttaaattttcaataacttggtaccagctgttctagtatttctatctccccgccaggaagctgccttcctcccactgcaacgccacctgtcaaaagcagagagcctgtgcatgccttcttttcagacaaaaatagttctcagatcacctgtggccttgccatctctgatggagatagtctcaacctgtttcctcacttcccctcccaaacccttgctccaggtttccatccagtatctctgccacctccagatctggagcttcctccagtccttgcccagcattaagctgggcacccgattctctgcagagatagccccaccacgggaaggaggcataggggcttccctgacatcaagagaagaggacgacacacgacccaagggtggaagagactgtggttccccaaagcttcccagtgcacttgagggttcacactctcccaccacatggtagcaccttgcctgggcagtggatccttcacctctgccctcacctcttccttattgtgatggttcccaaagggctgcgtacagagatggagggaatgacactgcccaggtaaccctttcatatacactgacccctttcttccttgctgaagacctcggctagctctgtcatcttcattttgtagatgcagcacagccgggtcttaaaagaggtcaaacagcagacaagctctaggcctgtttactcgtgtgttaaccgggtcatggagaggagctggacaagctgctctctgccatcccctctagcaccatttggtgacttaacttggacaacagccatgtatgggaaatattaaaagcaagtacagccacagcagcagctgctggggcctcggggtagcccaggccctgggagagccaagagggagggcctcaggccggcatcctacccttcagagggaggctcctttcctgttgctgtttctggttccaagacgccttccccaggaccatgagttcaaggagggttcaggcataatacaggcaactcccaatccgctctagaagagggaaagtttccatagtgcagagacactccctgctaccaagaaaaggtgtccgtgagcccatcctgacagacgagatgcgctgaggcctgtctcctgcagccactggcttcctgtcccagtgataggcttccacagccagtacaggactagagcctggggtccctgagcacacacctgtgtcaggaggtgctgacccagaagggaggcagggccagggcaagggttcagcccaggaatggaatgaaactgctgagggggctgcagagagaagcctgcccacccgctagactccctctggtgttcctgtaatgttcctcccagctcccccagctcttcctgataagggagacttggtttcctcagggaagaggggggaagagtgggcctgggagggaggctggcatgacagtcaggggaccccattctcaccagctccagttgcctgtcagactcaacattcatgaagcatctactctgtgccaggtacagcgctagactttttcacaagcactgccttatcctcccagcaacctcaggaagagggcattgccacctacgttttataggcaaggaagctgagctctagcaagatgaagggacttgctcaagctggctcacatgagttactagcagggccaggacttgaatccagactcgggggtccctgtcccatgctctgtgcctgtgctgtgtctcctccctctgccctgcctagagaagcaggagtcccagctgggctctagggacaaaatggcttgtgtcaggtcaggtccctcaggtgcacttggcaggctgacccgtctgtaacccaccatctgctggcctctggaagcagagtcagggtacagcttccagggacacatggggcaggaagccgaggctatgctttctgaggtgtcgctggcagcagcagccctgtccttcccaagttctgcttcaaagctgctcaggtttggttgggaaggggaagaggaagagtgacagccagaaggatggagccatgagcagaacagactggagcagcacggatgtagcagggttccagctgttcacctcagctctgctgtggacaaagaggctgggttggcttaaagctaacatcctcagttcacttccttagagtaaccagtcagttcaaagtggggaaaaaacagggcactcgacagatggatctcagggcagggaggaagagtcagacccacctgtgcttgtctcaccgtgtgggtcagtttcttcatctgcaacatggcttatgttggaatccatggctgtacaaagttcttccagttccaaaagcccatgaacttggacttctcacagatttcaagtatttggacctgagactccaagcaggtcacccaaagattcagaactcagaagctcccctaatactcagccttgccccccacaccttgagcctgagaaaggaaggaagaagagggaagtccagagggtgcagaattcttcagtggggaaagaggatctggagcaggtctctggatcccttagaagcaaggggctgtgggactgagctggaagcctcccccaggggtctgtgaccatggggcccggctaaaccctacttggcaggaatcgctgaccactgtggggcccacccagtccagctgctgtccactcaagcagcggcaggtgtcaggtcayacccaggcctctctcttcccctcccttcagagctaccattgtgtcaggccagcccggtgcggtgtgagctcctgcccttccaccccttgtcctatacccctcttctcccatgacttggaggcagcagacaatcctgtccccttcctggccccttgcccrtcactcctcagggtggatggctctgccatctctgtcttccacttagcagccttgctcccctcctcaacactattgcctgggctggtacaagagatggagagcagccaaaacaaagcagttggtccagcctccaggttggagctgctgtgtgtggatggaggcgtgggggaggagggactccagatg

SEQ ID NO: 94240 - DNA, 40909 bp, Homo sapiens
ggctggtctgaaactccaaggctcaagcagtccttccatctcggcctcccaaaatgctcagttaacaggtgtgagccatgtgagccactgtgcctaggcatttttttttttattggctgtgttgcccaggctggtcttgaactggactcaagtgatcctcttaacctcctgagtagctaggattacaggtgcataccactgttcctggctagagattttagccttagatagcataacattttgtcagggagaaagtatgattatcttgcagatattaaggtaactacaggtggaacaattaagtgatttcctatattaacacagcattctgttgtaggaatggagatgagggatagttgattgacccaggattggagttttactttgtgagtgaaaggatgacgaggtaaagatgccgaagactctggcaaaagtgattggagtaatggtccatggagtctagactgcctagggattgaagtggagatggggttgataacggagaatgtagaggaggcaagggactgaaggtccatgaaggctgtctgaacttgagatttcaagaatggagcaactggggagaagcaagtgcagggtatgacctttgtctgttgggacaaaggtcacctcagttgtagtggtcaaagcagtgggtatgtgggtggtactcaaggacagtgaggtctcctatgatgaaaacaagccaacactgcagtaaggaagactaacccgattcgaaaatatcagtgaatggtggaggctaggaaataacctgaatgaggaggggtagggtgacattatgccttatcttcaaagggatgagagcttttacatgaaagtggagtaatggtttggaaatggatttgaggaaaagaggactctgacatcaactgggatatggggaatttcagggaatgggcaacatcttgtgtgtgaaacctgcagagggtgggttttcagaaagagccagatttcagttaagccaaggaggcagggaaggactttcagtgctggattgtggaaggtggaagttttgatttggggggctagtgttacagacagacacaactggggggaaaatctcagtctgctttgcatttgagcaactgagttgtagtataaccaagatgaaacaggggctccattcatattaagttgcatgagtactactatgttcagtcagaatatgttgtgtgactacagtgtcccaggcaatatgttttgggttaataagcagtgcctagtctctactctggagctcagaatctagtgaaataagtggacaaataaacctatgtccatgggaatgactaactacaatgatttgtgaacactgagcaagggcacctggccctggaatgggagtgggggttcagggaaggctttttagacgtgatggctgagcgttaagtaggtaaaagaaacaggaaaccttgcatccaagcaaaggcacagaaaagctgatgaaacaacatggtcttaagtatggggaactatgagtagctcttgttgctgggatcgtgactgtgaggaaggcaatggtgagaacaaggcaagatgtgttatatcttggagggctttgtaggtcttgttttggatagctgttggagggtttcagggaagagtgaaaaagataagtatataggtaaatgccaacagggtggatgggtttaagagagtctacctgctaaaggtcagatgccctattagcaagggtcctaacaaaattaaataatagctttccacatgttttgaaagtaggatggggccaggcaaatttctcatcaaattctcagctttgggctgcactcggccactggtatctttactcttcttccttttagaagccagtaccttcatggctccctttttttggcttttggcctcctgtttggtactctgtgctctagtcatttaacagctatttgaactagaatcagttactctgatcttcagtttttgaatttataaatgaaataacatctgctttattctctccagctttagaattatgaattcacttttaggtttaaatatcttgagagtcttctctcacattgtttttgtttcctgtattttggggatagtgcttaacagtagtttttaaaaaccatattccttttttttttccttataagtatacatgtcaggcagggcgcagtgactcacgcctgtaatcccaacacttgggaggctgagacaggtggatcactgaaggtcgggagtttgagaccagcctgggcaacatggtgaaaccccatctctactaaaaagacaaaaattagctgggcatggtggcaggcgcctgtaatctcagcaacttgggaggctgaggcaggagaattgcttgaactcagcaggtggaggttacagtgagccaagatcgcgccactgtactccagcctggacgacagagtgagacttcgcctcaaaaaaaaaaaagatacatgtccattgttgggaatctaaaaaagtagagaagcaaatggaagactataaaaaccacccacagtcacattactcagaaagaatgactgctaacattttattttgtagacttttgaattcgttgtgtgtgtgtgtatacatgcttttaaaaatacaaattctccctctaattttgtgaaaacattacatcatccagatcagaggaaataggcctggcaaaatattgatatttaagcattcaaggatattcaacatttcctatcaaatttttcctctttttttttttttttttttggagatagggtcttgctctgtcacccaggctggagtgcagtggtgcaatcttggctcactgcaacctccgcctcccaggttcaagcaattcttgtgcttcagcctcccaagtagctgggactacaggtgtgcaccaccatatccagctcctatcaaatttatgtaagctattcttcgtcttgttattgaattttatactgatgacaagataattaattggctaccttttgtcaaatgggccttttgcatgtttcctggtggaaatttgggtttgtccctatatgcaggttacaaaggaacttattttagaagctttgaaaagttttccatttagtaccattctggggcttactctcttgttgaatatctcttgataataaacatgtccctgtactgtatgcagtagtatcatgtatatagcaggatcatgtagtgttgtggtttgtcaaccagactgcaggttctttgaggtggggactgggcctccacttagtatctaaactacatgatacaatggtgaaaccagagatgttaagcattttgttggccaattagttgactgcattcatgcttgctctcctttcttccacatctaacaccaggatgactcaggtactttcgtacctgggcatatagctaaaatttatttcaaggggttcccctccaccactgccatgttaacattcattaaacacttaattacagattactatgtaccaggcactgtctgaaattttgaggacacaaagatgaataaatcaaggctcctggctcagggatatcagaatataagttaaagcactgttgcacattttcacaaattgttaaaaaaatttgagaccatggctgggcgtggtggctcacacctgtaatcccagccctttgggaggccaaggcaggtggaccacctgaggtcaggagttcgagaccagcctggctaagatggtgaaaccttgtttctactaaaaatagaaaaattagccgggtgtgggggcaggcgcctgtaatcccagctactgaggaggctgaggcaggagaattgcttgaacctgggaggcggaggttgcagtgagctgagatcgcgccactgcactccagcctgggcaacagagtgagactctgtctcaaaaaaaaaaaaaaaaaaattgagaccacgaaacatcaaataatagtttaggtgaaacaaaatttttccttgaaactctcagattaaaaaatgtgcagtagaccaggcacagtggctcgagcctataatcccagcactttgggaggccgaggcgggaggatcgtgaggtcaggagatcgagaccatcctggctaacacggtgaaaccccgtctctactaaaaatacaaaaaattagccgggtgtggtggtgggcgcctgtagtcccagctacttgggaggctgaggcaggagaatggcgtgaacccgggaggcagagcttgcagtgagctgagatcacgccactgcactccagcctgggccacagagtgagactgtctccaaaaaaaaaaaaagtgcagtaatcagaaatacagaaatacttttccagcattttcctttatcataaaatgtaatattttaaattgtgttttcaaatccttgtgacacactaagttttaatagttttcattgattgtgctctgtgtgtcaggcactgccagaccattttctgccattatcttatttaattttctcaattgatgaagtaggttttgttatcctcatttcatacaagggaaacttgggttcagataaggtaatgtttccaaaaataacagagcagactgggtatggtggctcctgcctgtaatcccagtactttgggaggcggaggtgggaagatcacttgagctcaggagttcaaaaccagcctgggcaacatggcaaaactccgtctctacaaaaaaaaaaaaaattaaaaaattagccaggcagggtggcacatgcctgtagtcccagctactcgggagactgaggtgggaggatcgtttgactctgggaggtcgaggctgcaatgagccatgatcacgccattacactccactccagcctgggcaacagagggagaacctgtctcaaaaaaatgaaatagataaagactgggcgctgtggctcatgcctatagtcccagcactttggaacgctgaggcggatgggtggataacctgaagtcaggagttcgagaccagcctggtgaagatggtgaagccccatctctactaaaaatacaaaaattagctgggtgtcgtggtgcaggcctgtaatcccagctactcgggaggctgaaggatgagaatcgctggaggcagaggttgcaatgagctgagatagcgccacttcatccagcttgggcaacagagcgagactccgtctcaaaaaaacaaaaaggccgattttcaatgtcagatattattctatcccatttttgaaatttattttttcttttatatatatgaaatattttatttatatattatatatgtgtgtgtatatatagatatatagacataggggttttgctgtgtcgccagggctagtctttaagtcctggcttctttggaggctgaggcaggagattcgcttgagctcgggaggcagaggttgcagtgagcccaggtcacgccatggcactctccagtctggatgacagagcgagactctgtctcaaacccacaagacctctctctcccgctagtctataaagcttcttgacgataaggcttttgtgcttgttagtgaatactagtcctgtttctcctacctgacacagtgaacgctcataagatgtttgagtgctcgcatgaatgaacgaccagacccgactgaattattttttttcttcaggctcctgagtctggtcgacactttcagagtagacgtttccaagagatgattaaggacacacatccgcgcgtctgtacgtgcaaactcgagcaatacaacataaagcactgaagatggcgccactcaaaagcaactagaagccttcatttatcaggctggggctagggaaaatctggccagtgttgaagaatacaaagctaacctttgcaattccttgcggttctaccgttccgtaggtgccttctagaccaagggccgcaagtggtcaattcactaaatccaaccacagtcacaggccgctgctttgaatttaccacgcggaaagcagcttttcctgtgcttcctgcttcccccggaagtgccttgctacgggaagtgacgagagccgggtggacccagggtggggaactacctcttcctctccacgcggttgagaagaccggtcggcctgggcaacctgcgctgaagatgccgggaaaactccgtagtgacgctggtttggaatcagacaccgcaatgaaaaaaggggagacactgcgaaagcaaaccgaggaggtgaaacggagggacctggggccaggagggacgctgagtggagcggaaccccggggtgcgggagaagtgcccgggctgggatcgtgggagcgcgcggcggataacagcgcgtccagacaccgggcgtgggtcttggcgggcggtcgcccaggagtggtgcgctccccgggcagtggacgcgtcgtttgcccgaccgagccaggtccgccgtgcgctgacctcttcctctgagcttataggcatccacaggtcggaactctggtagagaggccctgttggagctcgggagagggccgggtgtcccacgtggtccccggcgacttgggcgcgcctcacacagtgcgcagagttggaccttcagtcaggctccacgttgttggctaagacagaactcccggcatgagcgtgcgcgaaggaagttacacgtcaagtcaaagtgggtactggaggccgggtgcggtggctcacgcctgtaatcccaacactttgggaggccgaggcgggcggatcatgaggtcaggagttcgagaccagcctggccaacatagtgaaatcccgtctcgactaaaaaatacaaaaattagccgggcatggtggcgcgcgcctgtagtcccagctactcgggaggctgaggcaggagaattgcttgaacccgggaggcggaggttgtggtgagccgagatcgcgccactgcacgtcagcctgggcaacagagcgaaactccatctcaaaaaaaaaaaaaatgtgggcactggagctttagagtagactggagaggtcttaacttcatctgcgcacgtgggccgcgtctttagtgactttttaaactctcgtaagggaagtagagtttgttttccggtaagccgccctgagaagatgacgtaattcagttattacgaaaatctgttttacaactgtttgacccacatgagttgactggatttcccatggaaatgtaaaggcatgtgttgcggtgctgagtgtacaccatattttttatataggccagcagtgtgcagtagttttaaccttgatagctgaccggtgctttgctgttgcttcctagtgatttaacttgtgactgagtctctgttctgagatcaagtcagtgggaacaaagattgtccttgaacttaggttgtacgctacttagaattaactttccttgttggtttctctgtcttttgatatggagttcttacaatagcaatattttagaattgtaggaagccgcggcagatttgtactcaggtgcaagaaggtcgtggtcctggtttacattgcatcagtcaattgcgttcaatttggcatgctcaaatccagaggtacatgaccaaactctgttatattccaaaagagaccaccaggatgggaaactcagtcttatttggtggaaccaagggatgaaaacgaataaaattttggaaggagactagcttgttttttgttggctaggagattattcttaatctatgatttgagaacagagaccaggcctgaaatttccgggaggcagaattcagcgtaatatgtacttccaacattgttctggggctctgccagaacaggcttctaaggaggctacaacacatgtctaattgttttcagtagtatgaaaagttgtagagggtcagaaagttcaaataggagccacagtcatctgtcttacttggttctaaggtgtcactccttccatattcttgtaacttatttattttattttaaattaagtacatcttttttacacatgagtgatagactgtgagtttttataactttttgtttcataaagtgtctctttattttattattattattttttgagatggagttttgctgtcgttgcccaggcttgttctccatgttggtcaggttggtttcaaactcccagcctcaggtgatccgcccacctcggcctcccaaagtgctgggattacaggtgtgagccactgcatcctgcccttttattttttgtagagacagagtcttactgtcacccaagctagagtgcagtggcatgattatagctgactgcagtcttgaattcctgggctcaagcaatcctcccacctcagcctcctaagtagctaggagtataggtgtgctgctacacctggctaattaaaaaaaaaatttttttttttgagacagtcttgctgtgtcgcccaggctggagtgcagtggcatgatctcagctcactgcaacccccgcctcccgggttcaagcagttctcctgcctcagcctcccgagtagctgggactacaggtgcgtgccaccatgcctggctaatttttttgtacttttagtagagatgagatttcactgtgttagccaggatggtctccttctcctgacctcgtgattcgccctccttggcctcccaaagtcctgagattataggcatgagccaccgcgcccagcctaaattttaaactttttcaatagagacggggtctcgctatattgtccatgcttgcctggaactgctggcctcaaacaatcctcctgccttggcctcccagagtgctgagattacaggcatgaaccactgcacctggccctaaactgtctttgtataaattcatttgctcttgtaagataggcaaagtgcagaattcctgttttggagttagaggctgcagtgagctatgatcatgcctctgtaccacaacctgggtgaaaaagtgaaattgtctcttaaaaaaacaaaaaaaatccctgttgttttacctgggattttagcaggaagaaagaaaagaaacctgcttaacatcatcaatctgtagatacatttgccttattctattggaattgaatttggactttttatagtattgagtttggagcctgttggagtatcccatgagcttatccaaatcccttatgaaaatctggtttataggccaagcacggtggctcatgtaatcctagcagtttgggaggccggagtgggtgggttgcctgagctcaggagtttgagaccagcctgggcaacatgggaaaaccccacctctactaaaaatacaaaaattcgctgggtgtggtggtgggcrcctgtagtcccaggtactcgggaggctgaggcatgagaataacttgaactcaggagtggaggtttcagtgagctgagrttgtgccacttcactacagcctgggcgacagagcgagactctgtctcraaaaagaaaatctgttttacaactgtttgacccacatgagttgaatagttactaaggggcactcttcattttccaagatagtgaaactattgatatatacccgtctatatatatagctaagaagcgattttagaaaaagcttactattttgatttttaccttatcacagcatgaaagtacaaatgtcgaaatgccccaaaattgtattttttaaagttgaaaatgatcttgaaataatccagaattgatgaatgttgcaaatgtataaatgccttattcagtgtttgtattttccttatgaattttttttagaaagagaaaaaagagaagccaaaatctgataagactgaagagatagcagaagaggaagaaactgttttccccaaagctaaacaagttaaaaagaaagcagagccttctgaagttgacatgaattctcctaaatccaaaaaggcaaaaaagaaagaggagccatctcaaaatgacatttctcctaaaaccaaaagtttgagaaagaaaaaggagcccattgaaaagaaagtggtttcttctaaaaccaaaaaagtgacaaaaaatgaggagccttctgaggaagaaatagatgctcctaagcccaagaagatgaagaaagaaaaggaaatgaatggagaaactagagagaaaagccccaaactgaagaatggatttcctcatcctgaaccggactgtaaccccagtgaagctgccagtgaagaaagtaacagtgagatagagcaggtacatttgcacttcattgggtagaagatatctttcattgttgtttcagataaataagtaggtaactgctatatgtactctttaatagtaggagaaaatgtgatgtgtcagcaccttgtgggttgggggataccttaggctgactgggacttcatcttaaaaattagcatacgacagggcatggtggctcagctaagagtactctgtcttttttatttttttatttttttgagacagagtctcgctctgtcacctaggctggagtacagtggcacgatctcagctcactgcaacctctgcctcctgggttcaagtgattctcctaccttagcctcctcagtagctgggattacgggtgtgtgctatcacgcctggctaattttttgtatttttagtagaggcgggctttcaccatgttggccaggctggtctcgaactcccaaccccaggtgatctgcccgcctgggcctcccaaagtgttgggattacaggcatgagctactgttcccagcrgactctgtctttaaaaaaaaaaaaaaaaaaattagcatagtgtcacaatgcctcctttacaaataagcagatactgcttaagcttagggagagtcttggtctgcttatttgcaagtcagtcaacagaagagatacagttttgtaaatgggccctagtttccctctgaggggtttaaccaaataaattattggaattactgaaaaggttgattgcataagtccttttggttaggccattaagtaatcatcctggagttgaacaggatgataaaatgtctgtccagaacctaattctgttatctttcagaaactcagttatgaaagaaatacgaattgtattaaaaaaatttgttttagacatgggatctcgctgtgtggcccaggctggtctagaacttgtggcttcaagcgataatcccgcctaagcctcccgagtagctgggattacaggcacaagccaccacacccagctgaaaaatactaattctaatagattttctttttgctatagatcatggtcaacatttgtaacttttttcctgattataaaaaatatgtgatccagagaaaatagaaaatgcagacattttgcaaaaagaaagaaatgcttcctggaatttcaccattcatttagtaaatattaatacctgtacttttcaagtacagaagtcatcttgttaatttttggtgtttccttgtagtacttttagtatatgcatctattatttttaatcagattaggattgtactgtgcaatcttgtatcttttttgtttctagctaagcattttcctcgttaagtacgcttaatggttacataatccttcatataaatgtcttgaaatctacttactacttgtattgagcattcagatatcttactatcaaataatgccacagtgactgctacctcataaaatgtttgttcattttctatggatgtgtgtatacaagagatgctgctttggaagagggctaatgacatttccatcagtatattgttgattatggttatggagtagatcttagttgagatctagtcacacataatcttagttgagatcttagttgagatctagttacccagtatatatttgcctcagatttttcttttgttaaagttttatagatttatgacaatgtttccttttcagatctcgagttacctatcaaggtttttgtatctttttggttgatttttaaagtgatgtgtttagaagaattgctttaggatagcttgttttgtctctttctcagaaggttctctattaatttgtgtaggtgattattgatttctttctatggccctttacttgataggaaatacctgtggaacaaaaagaaggcgctttctctaattttcccatatctgaagaaactattaaacttctcaaaggtaatgttcttggaaatatcgtatgatgttagaacgtattattttaacagaagcactccactatttttgttaagatgaaccaggatgtattcttattgtaggctgatatatgcagtcatataatgaagtaggcctgtgtattcaatttagtactatagtagtgatggttcttcatgcttcttaaacaagtggttaaagyttyttcaggccctctgtggtggctcacacctgtaattgattgaggccaggagtttgagatcttcctgggtaacatagtgagaacctgtcccgacaaaaagtttaaaaattagctgggcacgtggtaacacacatctatagtcctaactactccagaggctgaggaaggaagatcgcttgagcccaggagttcaaggcttcagtgaactgtggtcacaccactgcacgccagcctgggtgacagaatgaaaccctgtctcaaaaaaaattgtatttaatacagtgtgtattcagaagtgtattgactaatggtgctggtgaaattaagcaattaggtgatgccatattaatgttttatctctttcacttctgaggcatctctagattaatgagcctaatttataggcataaacccagaattcatttaataatctgcttctgaagtagctggagtcacagttactcaagtaggtgcttcctaaatcaggagcagcacagttggattgcaaagcaccagattttcaggcttatggatgagacttcaaatatttactataattggatgctttaaagtttgttgatatttttcagtcaagcagattctttactatcagaatatttctgagccaggtatgatggcttgcacctgtaatcccagctgtccatcaggctgaggcaggaggatcacttgagcccaggagttcaaggctgcaagtgagttatgatcacaccactgtactccagcatgggcgacaaagcaagaccttgtctcttaaaaaatatacgtatttgagcctaactttgtagatgttgaccagaaggtagaaytccttaattctgcaggaccagaagcatgagtagtatacttcagtatgtcmgtatggctaatgttttaagaattgcagtgtgagataacacagttaatttgttcataggccgaggagtgaccttcctatttcctatacaagcaaagacattccatcatgtttacagcgggaaggacttaattgcacaggcacggacaggaactgggaagacattctcctttgccatccctttgattgagaaacttcatggggaactgcaagacaggaagagaggccgtgcccctcaggtaactgtcttaaatacaagggctctcagtcagcataggaaaaaccaccacttgggcattgtgtacataccctactattttttattgagttcttatagtcacccattctatttactgtggatctttatgtgaaagtaatccaggacaattcttttatatttaataattaatatatacagatcattctctgtatatttcaatattttaatctttcccacagttttgatcatctatataattaatgctatcatatttccttcaaaccattagatgtccctggggctcatagctttcgtcaagtgtctgaccatttttgcctagatggagaaagcatttttggtagaaaagcatgaatgggcggtggctcacacctgtaatcccagcactttgggagcccgaggtgggcggatcacgaggtcaggagatcgagaccatcctggctaacaacatgaaagcccatctctaataaaaatacaaaaaattagccgggcgtggtggcgggcgcgtgtagtcccaactacttgggaggctgaggcaggagaatggcgtgaatccaggaggcggagcttgcagtgagccgagatgcaccactgcactccagcctgggcgatagagcaagactccgtctcaagaaaaaaaaaaaaaaaaaaagaaaagcatgaatggaaagaagggcaagtcagaggtgaaaacgccaagcccccatattagggtgagtccattgggttcatttctagagaacttgacatttaacaaacattaacctcattgaaatgactgcgaatgcccatgtagtcactttggctgtgggttcttgcagttgtctttctggcctaacctcacttgctcactggccttccagtgtccatgctccccctttgttaatttgtttactgctatatccctagcacattttagatgaatgtattaggtgttcttgaatcatattagtttcataccattaccctatttttgaggacctgtagcagttcaagcaattctcctgccttagcctcccaagtagctgggattacaggcgtgtaccaccatgcctggctaattttgtatttttagtagagatggggtttcaccatgttggccaggctggtctggaactcctgacgtcaagtgatccacccacctcagcctcccaaagtgctggaattataggcttgagccactgcacctggactttttttttttttttttttttgagacaaagtctcgctttgtcgcccaggttggagtgcggtggtgcaatcttaacctctgcctcgcaggtttaagtgatcctcccgcctcaacatcmcaagtagttgggattacaagtgtgagccaccacgcctggctcatttgtatttttagtagagatagactttcaccatgttggccaggctggtcttgaactcctgaccacccaccttggcctcccaaagtgctaggattataggcatgagccattgcgcctggccagcagtttcatgttttatatatatatagatcaaattcatattgctctaggattcaaagccccttacattgttggctctaccttacttctctgattttgttctgcttcaaattttctctactgtagaggttaagactataggttttggatcccaattgcttgaaggctctgctccttcttagcctttggggtttagtcaagttatttatcctctaatacctagctcaaaaggttgcaagaattgaatcagaataatatatataaagaatttagtagagtctcagatctattagacaaaaatattagataatgttatcgtcatcatcagcgttagaccttgttcaagtcgttcttttcctggaatgctgttctttaaggactagattaagaaacaaatactacacagtaatttgaattcaattatttttctttrtcaggtactggttcttgcacctacaagagagttggcaaatcaagtaagcaaagacttcagtgacatcacaaaaaagctgtcagtggcttgtttttatggtggaactccctatggaggtcaatgtgagtacattcaaaaagtgagggaggtataatgccacccattgttgactgctctgattggatttcttttcaccttgacatctggcttctctatataggatagtcgtttatggggattttcttttgccattgtttaaacatggtcaagaacatggtcctgcttgatgataggcaaatcctgtatatcgttcttaggacttttatctatttatatttatctaggggctacaaaagtaatttattattgaacccaaaaagacagtccatttgggctctaggaaataggaagtcagaattcaaggttcctcttgtctgtcaggaccttgggtctgtccctctttctgcatggttgcttctttcttgatgtaggcaggctttctttccttggggctcaagggccaaatgttagtctctactcttatattccattacttcccagttcaaggccttggagctttattattagagcagatgtataaattaggaagggatttaaggaatttaaaaaaatcatagttttggccaggcgcagtggctcacgcctgtaatcccagcactttgggaggctgaggcgggcagatcacaagggcaggagatcgagaccatcctggctaacacggtaaaaccccgtctctactaaaaatacaaaaaattagccgggcgtggtggcaggcacctgtagtcccagctactcgggaggctgaggcaggagagtggcgtgaacctgggaggctcccacgcccggctaatttttgtatttttagtagagacagggtttcaccatatcggccaggctgatctcgaactcctgacctcatgatctgccagcctcagtctcccaaagtgctgggattacaggcgtgagccaccgtgcccagccggaagtaatttctttcctgatgctattgtcctccagtagtgcatatttctttctttctttttcatttatttatttatttatttggtgagacagagtctcactctgtggcccaggctggagtgcagtggcgtgatcttggctcactgcaacctctgttgcccaggttcaagcgattctcctgcctcagcctcccgagtagctgggattacaggcgcccaccactgcgcctggttaatttttgtagttttagtaaagatggtgtttcaccatgttggccaggctggtcttaaactcctgatctcatgatccacccaccttggcctcccaaagtgctgggattacaggcgtgacccaccacgcccggctgcatatttcttttatgtcactttgtacactagactgtcacttcaaatatttactataattgggtgctttaaattttgttgatatttttcacttctaatgtttttcccactagattaggagtgccatgagtatctttatcattattacttagcatattactttgtacttgtaggtatttaacaaatattttagagtaacaatacagttaactgtggtaccccacacagataaaagtacttactaaaaacccagcaaatcttgtcattgttttttatagttgaacgcatgaggaatgggattgatatcctggttggaacaccaggtcgtatcaaagaccacatacagaatggcaaactagatctcaccaaacttaagcatgttgtcctggatgaagtggaccagatgttggatatgggatttgctgatcaagtggaagagattttaagtgtggcatacaagaaaggtaatccacaaattcaagaagctgataaaaaagaccaaaggaagggtggtaactctgtctcctgggttcaagtgactctcatgcctcagccaccctagtaactgggattacaggcacccaccaccacgcctggcctcgtatttttagtagagatggggttttgccatattgcccaggctggtctcaaactcccagccccaggtgatccgactgcctcaccctcccaaagtgctgggattagaggcatgagccactgcgcctggcctggtgactaagtagttttctaagagattaataaagccttgggaaattggaatggggctcattttatctagaaacttggattaaaaaaaaaaagtcattactctgggattaaagctggtgaggaaaaaaaaagtcatgatttatcatattaccacaatggggaaaacttggaaaagtaaagaaaaataccatcttctgtcatcttgatgtggtctgcttttggtgtattcctgatgttttgcattttattgtatatatgtgttgattatactctgactatacatataaaaattcagcaaaaatactgtatgaagtggttggccatgacttaattctaccatctgcctagtttgatttttattcaatataaatagttctgtttagccacttttatacagatagcttctcacctcaatatctgggaattgttttttgtttttttttttgagacagggtctaaatctgtcacccaggctggagtgcagtggtgggatcttggctcattgcagcctccaccttccaggttgaagcaatcctccgagtagctgggactatagatgtgcgccaccatgcccagctaatttttctgttttttgtagagctgggtttcaccatgctggtcttgaactcttggactcaagtgatcttccctcccactttggcctcccagaatgctgggattacagatgtgctctaccgcggccgccctttttttatttttaagataggccctcaccctgtcactcaggctatagtacagtggcaccatcatagctcactgcatccctaaactcctgggcctcagcttcctgagtagcttagggctacaggcgtgcgccaccatgcctggctaatgtttttattattgatagagacagggtctcactgtgttgcccaggcttgtcttgattcctggcctcaagtgatcctcctgcctccacctctgaaagcattggaattacaggcatgagccactgtgcctggcctggaattggttctttaggatagatttccagaagtggaattactgagcttaaaagtgtaaaaaattcatgctcctcaatatacattgtcarattctctccagaagggttctatcacacttctatttggaatgtttgagaatgtgatgtcactcttaagtagaattgaacaaacaaaaatagtagctggactcaatgattggacaagaattctaaattcataaaatattgagaatagaaatcttagaatagatttcgtttgtaattcaaaagcctaatggtcagaaagcaaaataactttaaagtactttcactattttaaggatcttttagataaattacctagcggtatttctttgcccattgggaaacctctgtcttccagttttgtgtcctcagtgcccgacttggcctcaggtggttgctggtgaacattgatggactgtggaagtattaggttaggtggaatactatgtaggcttgtttggattattcatactgactttttttttccccctcctcaaagattctgaagacaatccccaaacattgcttttttctgcaacttgccctcattgggtatttaatgttgccaagaaatacatgaaatctacatatgaacaggtggacctgattggtaaaaagactcagaaaacggcaataactgtggaggtaaattatttacttagttgccagaatataaaattgtatatatttttttcttgtctgttagtattaagactggcaaatgctctttttccagataaatactaaatccatgtgaaaagccaaggaaaaatatttctatttgagctgtatatgatatctgtgtttttatttttattttttgagatggagtctcgctctgtcaccaggctggagtgcagtggcgcaatctccgttcactgcaacctccacctcccaggttcaagtgattctcctgcctcagcctcctgagtggctgggactacaggcatgcgctaccacgcccagctaatttttgtatttttagtagagacagggtttcaccatgttggccaggatagtctcaatctcttgacctcgtgatctgcccatctcggcctcccaaagtgctgggattacaggtgtgagccaccacgcccggcccgatatctgtgtttttaaaatttcatcatctatggcctcatttcatttcagaatgatttggaacttaaatctatctgagttatgtaaacataaatcacacttaaaatttaaacattagagggcagcagagaaatctagtgctttgtgtttaagcttaaaagtgttgaagtttaaaatttcacctttgattctgataatctagatgaattaatttcactgaggaacagacctgtatattaatctactacagattgggtttttaagtaaatgaaaaggcaaaacatacagaaatttgttggttatttggtttcctgtagaaagctagggagtggcatttcctttcctgcattttcctggttgtcagaaaataaagaagttagatgctctttagagaaaggggagaggcatggggagatgggcagatcatgttgctttctgctttactggcttatttaggtttttttctgtcagtggtggctgcagacagctcttatcaggcttgagtagttgtttccaggagcaagacattagaacattagtgttgtgctcactgatcattgtgttgtgattttagtttccagcaaagctttactaaatagatgttttttttcttcttacataagcatctggctattaagtgccactggactcagagggcagcagttattggggatgtcatccgagtatatagtggtcatcaaggacgcactatcatcttttgtgaaaccaagaaagaagcccaggagctgtcccagaattcagctataaagcaggttggtccttccccttatgccagcaaaactggggatatcaacaaatcttcaccttgggcatatctgctcttggtctgattttcattcattcagtgaataccagtttagtttagtttagaaatgagaggaagctacttttttttttttttttttaattgaggcagagtctcattctgttacccaggctggagtgcagtggtgtgatctgggctctctgcctcctgagttcaagtgattctcccacctcagtctcccgagtagctgggattacaagtgagcaccaccattcctggttaattttgttttttctttatttttttgagagggggtctcgcttcttcgcccaggctggactgcaatggtgtgatcttggctcactgaaacctccgcttcttgggttcaagcagttctcctgcctcagcctcccaagtagctgcgattacaggcacgtgccagcatgcccagctaatttttgtatttttagtagagatggggtttcaccgtgttggccgggttggtctygaactcctgacctcaagtgatccacctgcctcggccactcagaatgctgggattataggcatgagccactgcgcccagcctaattttttttttttttttttttttttttttggagacagggtctcactccctttgcccaggctgaagtgaagtgcattggcgtggtctcggatcactgtagcctcaacctccaggtagcatgcaccaccatacctggctttttttttctggatggtgttttattattgatataattcatgtgccacatattatcattttaaagtgtacagttcagtggcttttagcataatcatgaggttgtgccacagtcaccactatctaattgggaagactttttttatcttcaacttttaggttcaggggtacatgtgaggatgtacaggtttgttacatagctaaatgtatgccaaggtggtttgctgcacagatcatcccataacctaggtattaagcccagcatttattagcaggattagctattctcctacccacccccaactaattttatttttttaaattttttttctatttttagtagagaccgagtcttgccatattgcccaggctggtctcaaaccccagcctcaagcagtctgcctgtctgggcctcccaaagtgcatgagctactgcacctggcctcacttctttctaatgatcagagggtacatgttagaactcacttaatctgtcatggcatctcatcacacaaatgaggaaagggtggctcagacctaaggttacactgataaaataggtttgatcactcttgtctcattctcaacttcaataagtaaagttggatacagttggaattgataactgaggatttggaaataatattgaggcttatccattcaagacacattttcccctttgtaatgttttcaacaggcatgtcaccaaaatatgaatgtcttttacaggcctaactgatgaagagaaaaagtacttgtattgttggaactggtgttcttacatccgtttatttattggcaggatgctcagtccttgcatggagacattccacagaagcaaagggaaatcaccctgaaaggttttagaaatggtagttttggagttttggtggcaaccaatgttgctgcacgtgggttagacatccctgaggttgatttggttatacaaagctctccaccaaaggtatgtgctttatgcttagattttattttgttttgttttttttgggtattaaaacaaattggaaattgtattatttactttcatgtcattagtatatagctatcttttgagtgctgggatgctaagggtgattttgagaatgaacctgttatcagacacccccctcagaactgacacttgagtagaagtgcagtcagcagacagaggttcaaaaggtgacttggggatatagtgtgatttttgagccaaaccttgaagatgggtggaaggactgagatgggataggggtaagtaaggtagataaatgcatgagcctagaggacaggggagagaaagggcctgtaattaacctctgtggttagagatgcttaggtttgtgagttataggaacctctcaaggaggaccctgaatcatagtttacttgatgtggatagttcttcacgtaaataaaggttgttccaaaggtattccaatcacttccaacatgaggaccccaaaatctcacccaaattggcaaatcccccatggttaaaggctgcttacaacaatggggaaaaataactgaagactatgaattcaccaattcttaaaaaggaagtcccatgagtgtgtggtataaacattgtttcacgagcctttagactttttgatatggtagccactagctgtgttgagcacttgaaatgtaggtggtctgaattgatctgtgtactgcaagtgtaaaatacatactgcctaactttttattatgcggtctggattttgaagacttacgaaaaaatacaaaatattgcattggtaccctggtttgtatagatagtatattgaaatgataagacttggatattctgacaggcgtggtggctcatgtctgtaatcccagcaccttgggcggctgaggcaaacgaatcacttaaggtcaggagttcgagaccagcctggccaatatggtgaaactctgtgaaaccctgtctatactaaaaatacaaaaattagccaggcctggtgtcaggtgcctgttgtcccagctacttgggaggctgagacagcaagatcacttgaacccggtaggcggaggttgcagtgagctgagaycatgccactgcactccagcctgagtgacagagtgagactctgtctcaaaagaaaaaaaaaagactagatatattgagttaaaatacattaagcttcttaaagaaatcttttcagtctgtctactggaagactgaaaattggaattacatatatgcctctaatggacaagcactatttagacaatgctctttgtaaatttgcctgcaggacagggaccattgttctagaagctttaaaaattgccagaggtctttaaattgaagtgctaagggaccttctccctcatgtccccaggtttataaccacaattgctagtgttcactgacctgcataggctactcaggtgtttgtctctctttttkggtttagtgttactcatgtattttacttcaataggatgtagagtcctacattcatcgatccgggcggacaggcagagctggaaggacgggggtgtgcatctgcttttatcagcacaaggaagaatatcagttagtacaagtggagcaaaaagcggtaaaactattcttacctttcattaagcaaatgttgagttctaaagtcagtctttggtttcttcaatttttatccactttaaaatatttttatttctagtgtgtggcaatgactgaaagcttattgttaggtacatatgttgtcctgtgataaaaggcccattctgaagtaactttgcatttgaaaacagtgattttgttttcatatgtttgaaaggaagttttcagacaatgataaatatgaaccagagataattaagattgaggggctgtaggaattgcttgaaaatcaaatgaatgagggtatgtcaaaaggataaaggggagaagagactaatttttcctccaggagaattggaatagtgtatgtagattcttgccccttcaggagcttcactcgtctccttcctcttgagtggactgcacttagggacttgctttcaaagaatagagtaaggtggggagtgaggactttaccgaggagagatgaacaaacactacctgggccagttgatygtgggtcacatcattagtgataggcacatagccatgtgcccctgataagaggtggtaaggcgagcattcacttcgggtattcctcccccaaatatgtaaccctgagcatgaggaaaacacaagacaacctcaaactgagggacattctacaaaactgttgaccagcactccttaaaactgtcaaagtcatgaaaaacaaggaaagaaggaaagacagacatggaataaagtctggggtttgattaatagtttagccatgttggtttcttagttgaaacaaatatacattaacagtgtaagatgttaataatagcagaaacctggagctctctgtactgtctttgtagcttttctgtaagtctaaaattaaaagttcattttttaatgtaatacatacatttggcctatattaaaaaattaggggactgcttatcttattggaaacaattgatggccactgtacattaaactgtggttcattttcctgtagggaattaagttcaaacgaataggtgttccttctkcaacagaaataataaaagcttccagcaaagatgccatcaggtatgttccctaccactgctatggtctgttttagtgttggttcaaatactgcatgtctttgtacagtaataagatttgacttaaaaaaawttttttttttaaatttttgagacagggtctcactatgttgcccaggctggtctcaactcctggtctcaagcagtcctcccagctcagcctcccaaagtgctaagattacaggtgtgagccagcatgcacagcctattctttttaactgataacctgtttatcaaaaaaaaaccagaccgtgctgaagtagaatttcacaaagtggataccctcgtttctactcattcctgtcctatcctgtttaccagaggaaaccactattaaaatagtttgctttgtctaggatattttaagggataatatcttaggtatagtataggtgcttctcacccactggctgattagaccacagattacattccaaatctacattaatccagttccttccctggtaggatgaaagttgattgcttcgttaatagtaaatgtctagatggtgaggattaggttaattaacagtttgtcaaatggaggtgctgctggcattggaggcaagagaattattttttatgggattgtcctgcaaatggaaggatatttagctgcttaggatccgtggctgattcccctgtgccacatactcagggtaagtagggttggcattataaaaaccagaaaccattttccagatgcctcctgatggtgacctatgttctctgttaaagaaccactgagtttgggcatcatttttatagtagttttcacaattactgtaaatgcttatttaaaaaacagacacagggagtccatgatcaaaggaaatcctggatgtcaatcagcatattaatagttcaggaaagttttgttaatgaaagagttttgggccaggcatggtggctcatgcctgtaatcccagcactttgggaggcyggggtaggcggattgcctgggcaacacggtgaaactccatctctataaaaaatacaaaaattaggccgggtgcggtggctcacacctgtaatcccagcactttgggaggccaaggcgggtggattacctgaggtcaggagttcaagaccagctggctaacatggaaaaaacccatttctactaaaaatacaaaaaaatagccaggcgtggttgcgcacgcctataatcccaggtacttgggaggctgaggcaggagaatcacttgaacccgagaggtggaggttgcagtgggccgagatcacaccattgcaccccagctaggacaacaagagcaaaactctgtctcaaaaaaaaaaaaaaatacaaaaatacaaaaattagatgtggtagcaagtgcctgtagtcccagctactctggaggctgagatgggaggattgcatgagcccaggaggttgaggctgcagtgagctgtggttgtgctaatgtactccaccctgggtggcagagtgagactatctcaaaaaaaagaaagagggaaggaaggaagaaagaagacagggaagggaggaaaggaaggatgagtgtattttttttttttttgagacagagtcttgctctgttgcccaggctggagtggagtggtgcaatctcatctcactgcaagctctgcctccctggttcacgccattctcctgcctcagccttccgagtagctgggactacaggcacctgccaccacgcccagctaattttttgtatttttagtagagacggggtttcaccgtgttagccaggatggtctcaatctcctgacctcatgatccgcccgccttggcctcccaaagtgctgggattataggcgtgagccaccacacccagcctggaagagtgtattttaactgcatttttcaaatttattttagcatggcatgtttttttaagtgtcctacagacagggttcccttgggtgccagttaaggagagttggggttagatggccaagaaggggaatgggacaaagatgctggtggtatacaacaaacagcctccagcgtgccagccctgacacggctgcatgtcactttctcccctttttactggatgatctttttcaactttgaatgggacatttattattgccaagataatagtgacccccttaagaatgtacaaatagtcccataaaggtccttatcattttttaaactgactttggaggtctttttcttatttcttttattttcttttttttttaaagagacggagtttcttaaaatgattgtgtgtggcacagtcatagctcactgcaatcctcccacctcagcctcccaagtagctgggactacaggcatgtgccaccacacccagcttttttttttaaacttcagaatggaaataggttttttctgatcctaaaagtaacacatgcttcttgtataaaaactcttgacataattcatcatcacatctaatggtagtatgacattttattatgtctgttttgtggcttatataagcagcccaaatgatgcacattttaaaattgtttgtactttttgtgtattataagtaacaccgtggtgaacttcttgttttattatttccttaggataaaatggtggggtaggtgataaattagaattacatacagtcaaaggaatggatttattactatagaaatatgattattatatactgcatcaaaaataaatatgttacacatgtgaaagatttggaaagttactcatttatcttgagatgtcttagaaatgaaatgtgtccacttctagtatcctttctcctaacacactctcaaacaacaggcttttggattccgtgcctcccactgccattagtcacttcaaacaatcagctgagaagctgatagaggagaagggagctgtggaagctctggcagcagcactggcccatatttcaggtgccacgtccgtagaccagcgctccttgatcaactcaaatgtggtaaggttctgcagcacattcctgacacttcataatttggggtatgagcaggatatgaaagggtttcatttaagcttcccagttgttttcattttctcatgaagttagtaaagtattaattgtattttacaatttctggccagacacagtggctcatgcctgtaatcccagccctttgggaggcacaggcaggaggatggcttgagcctacaagtttgagatcagcctgggcaacctagtgatactctgtctctacaaaaaaataaaaaaaaaaaaaattagctgggcgtggtgacatgctgtggtcccagctacctgggaggctgggatgggaggagggaggattacctgagctcaggaggttgaggctgcagagatccatgatggtgccactgcactccagcctgggtgacagagtgagactctgtctcagaaaagaaaagaaccaataattcccatgtttaaacacacacacacatacatgcaaatccatagaggcagaaaatatgagtggtcctgactggctgtgtggagggaggaatggcagtggctagtaatggatgcaggattcttttgggtggattatgccatgttctgaaattttagatagtgctgaatggttgcagatcttacaaatatactaaaacaaacaaaaaaaacactggattatatactttcaaatggtgaattttgtggtatgtgatttttaattgttttaatcctaaagtagcccaaacatatatatgcgcataaatgcatataatacatttagccagcatacctagaaactttagaaggtgtatgcttttcttttcctgtaaattcaaatttttattgagataattgtagatttacatgtagctgtaagaaataatacagagagatcctttgtatactctgctcagcttccctaaatggcaatattttggaaaactataataccacaaccaagatattgacattggtacaatcaaccagtcttactcagagttccccaagtaaaacgagggactgttcgtactaattgtttgtgtgagatgtatgtttttaggaataacttttcaagaaatattttagaatcacaaaagcaggtatttatcaattaggtttattttcagcactttaattttattctcctttcttgtgttgtaagggttttgtgaccatgatcttgcagtgctcaattgaaatgccaaatattagttatgcttggaaagaacttaaagagcagctgggcgaggagattgattccaaagtgaagggaatggtttttctcaaaggaaagctggtaaggctggggtctctgttgtaaccttgatggggctttatgtgggcaggaaaacagtgtggtgtgggttcttcctgttctgtggggatgctgcatctcttcactctctcatcttccctgggtaatctcatccgtgatcctcagatgccactctgccactgacaactactgtacctctatctccagcctgaaccgttctcacaatgccagacttgatccagctgcttccctgacatctctacctaaatagcttatttaaagtaactttttcagaatctttttttttcttagcaatgctattctagcactggacttattcagaatcttgaattcaaattaaaaatgaaaaaatttgcctcccaaacctggtgttctttcttctgaggccttctctttgtttatgccatagactatcacaaggattctcaaacattttggtttcacaatccctttagcaaatgttagggacccccaaaagcttttgtttacatgggttatatctattgatacttactgtattagaaattaaaactggaactctaaaacacaatatcatgttccattagtcatcagagcaatgattttatcacgtcatatatgtctaggaaactccactgtacccttgagggaatgagtgtggaaagggcaacattattatgaaaataattttgacttggcgaagcccctaaaagatctcaggtttccaggtttccattggcctagtgaactaatcggatttatcttcaacttattgcatgtctagccatgttgttatctccttaagcaactccacaaaacttgtgggataaagtctcaaccctttcataggaggataagatccttcatgtcctggcctctgctaaccttacagcttaatttctacctcattgctaccaayaccatttactccagcagtgcccagtacaccatgctttatctcatcctcagtgcatgctgaacctactatttatagtaatctttcggctgggccccgtggctcatgcctgtaatctcagcactttgggaggctgaggtggacggatcacctgaggtcgggagtttgagaccagcctgaccaacatggagaaaacctgtctgtactaaaaatacaaaattagccgaggataatggcgcatgcctgtaatcccagctactcaggaggctgaggcaggagaatcacttgaacccrggtggcagaggttgcggtgagccgagatcgcgccattacactccagcttgggcaacaagagtgaaactccgtcttaaaaaaaaaattttatatatatataaatcttttcctccaaagtagcttttatgactttgcttagccttaaatcttaccaggcaatgttaggggcrtctttatctgtacttcagagtctttaggacacatgtttatgcaggtaaacttttaccttgctgtgtttgctaatggagagcctcaagaacactcaaaggcaaaaactgttttctaattacctctatacccagtgaatgcctgggattatactctacttcgtaaatatgtaagcgaagattcccatgaatggcaaaatccaccagtaggtgatgatacctatgttatgattgggtaaattttggggtgaaaggggtgttccttataaaatattgcagttgaagacagcagggagaggagtgcctgtattagttaacacatagtttgactatatttttagacgatttccttgattggagaggatggcacttaatattaaagatggtgtcctggctaggtgccatggctcacacctgtaatctcagtattttgggaggctgagctgggaagataattcttgagaccagcctgggtaatgtagtgmgaccctgtctctaccaaaaaaaaaaaaaaaaaaaagccagatgtagtggcatgcacctgtaggaattcaaagttacagtgagttgttaattgcaccactgcactccagcctaggcagtagagcaagaccctatcttaagagggaaaaaaaaaagatggtgtcctgtattatttttttcatactcttacagaaggctgaattaagaaaaaccagaaaatcaacaatagaagatcacttgtttttctgcttttaattaggtcattctgaatagctggcattgcttttctgatggaaggcagtatatagtttagactataggttttagagccatacagactagattttaaatacttgtgccatttaatagctgtggggccttagacaagtcagctaacctttccaagcctgtttgctcagcaataaaatgtagctaatagccactagggggttagcacagtgtaatagctaagactctgtctatagttagaaagttctaaatcatttggggttctttttttcaatgttccttgtctttctgcagtgtacttttggcagctataatgtattagctttggtctaaagttcatctaaaattatacctggtggtttttttgctttatgttttttgttttcttttttttaaagaatacgtggtcttttaaagggagtatttttcatgtgcgttggttggattaacttccatttgctttgatttctagggtgtttgctttgatgtacctaccgcatcagtaacagaaatacaggtattcttttcccttagattttaaagttaacatacctaaattgtagaatgttaattatgaaaatagagaataatagattgggaaacaatagttctggttcctttagtaagagataatcgataattaaattttggaatattcccccctaactttttaattctgatatttttgtagttgaacccacctggtttctatatttcctttatacaaagytgtgaacgatatccagctctccccaccctttaacacttatatatggtatatagattttgtgtgtgtgtgtgtgtgtgtgcatgtgtgtgtgtgttttcagacagagtctcgctctgtcgcccaggctggagtgcagtggtrcaatctcggttcactgctacctccgcctcccgggttcaagcgattctcttgcctcagcttcccaagtagctgggattataggcccatcactacccccagctaattttttgtatttttagtagagacgggggtttcgccatgttggccaggctggtctcgaactcctgaccgcgggtgatccacccacctcccaaagtgctggaattacaggcatgagccaccacgtccagcctacaggttttcatagacatttaaaattgttacatctttattcaatactgtgagaaatgtgtgcttaatatatttgttttattacctttggctgtagataccctgtagcaattgagttgaataaatggtttaataacttaataaatgaagtagtgatgagggctatttctcataatgaaactgtgttttcccacacttcagggacactggcttttggaccatgatgggtggccagtgttatttttgaccagtgacttgttaagcacttakgttatcaccttttctttgaagaagtggcaaatattttgtttttctcatgctttttaaaaattgaatactaattaaagcacacaaaaacaaaacattctctcaacaggagaaatggcatgattcacgacgctggcagctctctgtggccacagagcaaccagaactggaaggaccacgggaaggatatggaggcttcaggggacagcgggaaggcagtcgaggcttcaggggacagcgggacggaaacagaagattcagaggacagcgggaaggcagtagaggcccgagaggacagcgatcaggaggtggcaacaaaagtaacagatcccaaaacaaaggccagaagcggagtttcagtaaagcatttggtcaataattagaaatagaagatttatatagcaaaaagagaatgatgtttggcaatatagaactgaacattatttttcatgcaaagttaaaagcacattgtgcctccttttgaccacttgccaagtccctgtctctttcagacacagacaagcttcatttaaattatttcatctgatcattatcatttataactttattgttacttcttcatcagtttttccttttgaaaggtgtatgaattcattacatttttattctaatgtattatctgtagattagaagataaaatcaagcatgtatctgcctatactttgtgagttcacctgtctttatactcaaaagtgtcccttaatagtgtccttccctgaartaaatacctaagggagtgtaacagtctctggaggaccactttgagcctttggaagttaaggtttcctcagccacctgccgaacagtttctcatgtggtcctattatttgtctactgagacttaatactgagcaatgttttgaaacaagatttcaaactaatctgggttgtaatacagtttataccagtgtatgctctagacttggaagatgtagtatgtttgatgtggattacctatacttatgttcgttttgatacatttttagcttctcattataaggtgattcatgctttagtgaattcttcatagatagtatatataaaagtacattttaatagaaagccagggttttaaggaatttcacatgtataaggtggctccatakctttatttgtaagtaggctggataaatggtgcttaaatggtaatgtactccacttcttcctattggaagattaacattatttaccaagaaggacttaagggagtarggggcgcagattagcattgctcaagagtatgtaaaaaaaaaaaaaaaaaaaaagaaccaaaccactggaaataatcaaatgcaaaaaggtaacaaattcataactggaaagcaaagagaagaacaagtatgatttggatgataaagcattgttttaatggtgaaaacttcacagatcactaatgtttctagaggttaacttcaagtgggcaagctggggtttttaggtagtcagtggcctagttcctaaagccacagtataggatctgttaaactgaatgtctgttgaaagtttgttttagctgcttggaggcttccttttaagacaaactgtatgtgattaagttgttttgagggaactgaagaacctgatgtagcccctggccagataactgcctgatttctcagatattatttctctgggaaacattctacatagcacaggagcttaagagtggcattatcttctcgccttaatttccagagattatttctgtactgagaatcctggaactactatgctaggaaatttaaagctgcatggtctgtcttgttttcatttaattattgtgaatacctagaatctttcttggtcctgatttctcttgcttaatccagtctttatctctaactgccccttatttgatcaccatgtactaggagctctgatagccagctcagctcctaatccttgaggcaacattctttttctatttgaacttcagttctgtccttgaatcccgactagatatttcttgccctctggtctcagaattctcttggcttttattccttgatccacttgccagttttatcactttacccttgttcctcatggcttcccatcaagccatgggtattaggtgacagtgtaatttattagattctggttttgcccaaatactgggcatgctttaataataactgaaccatttcattatttggataggcatgggtaccttatcaagcagattaaaaggatatggtacccgtcctttagaaaagaacagctaaaaccttgttgtggattatggatttagcctaaagaaaaataatctggcataaattaagagtaagagagaagattaatagaaatttcacttcacataacttaaaacatggctatttcaataaaggactaaagtttctcctggatcccagaattcaacctgtatttataaatgtataatgtatttagctactttttggtttaaatgaacttgttgggttagcttggtaaatgttataatttttactrttttctacaaagaaaatattttytaatttaagttggagctatctgtgcagcagtttctctacagttgtgcataaatgtttttactataaaatgagctaatgtataaaatactgctgtataccataataaagatagtaatacttgattttagtggcttttgttttctaaaatgaaaatagcttgaaatatttattataaaaataataaaagctagatataaaaatctaaagagaaaaaaaaccagtcacccttatctaatattttagtgagcagtcttccacatgttcatttataaaattggaattatttgattttgtgtattgcttttcccccctcaacatgttgtgcacaattttgtacaggcttacatggacatttttgatgacatgttttcttgtatggatatgccactacacatttaaccagtactcgatgtccatgttggttatttctaatttttcaccattataaacaaccctaaagttaatatcctcacatatgtgtttgcatactcgtctgtcaccttaggatacgttttctaaaggtagaactacagctttgaactcctaggctcaagtgatcttccctctcagcctcccaagtagctgagactacaggggggtaccaccaaacctggctaatatttaaattttttatagagatggagtctcattctgttgatcaagctgtttgtgaacccctggcctcaagcaatcgtcctgccttggcctcccaaagtgctgggattataggtgtgagccaccatgcccgccctcttctaattatctgtcatgagatggatctccagtcattgcattgaggtttatgtatttaatatatttagtgttttccctataccggggcatggatttttgtctttctttgagacagggtctctatctgttacccaggatggagttcagtggcatgatcatagctcactgcagccttgaactcctgggctctaatgaccctcttacttcagtctcccacttagctaagactataggcatgtgccgccacacctggccaatatttctttaaaaatgttttttgtagaaaaattagctgggcatggtggcgggcgcctgtagtcccagctacttgggaggctgaggcaggtgaatggcgtgaacccgggaggcagaatttgcagtgagctgagatcatgccactgcactccagcctgggtgacagagcaagactctgtctcaaaaaaaaagatgttttttgtagagccagggatctcactatattgtccaggctggtgaatttttatccattttttactgctgaattcccagcacctacaacagtgctggcaaataatagataactaaatattgaacaggtgaacaaattttttttttttttttttttttgagacagggtctcactctgctacccaggctggtgtgcagtggcttgatcacagctcaccgcagcctccaactgccaggttcaggtgatctcccatgtcagcctcctgagtagctgggactacaggcatccaccaccatgcctgtcaaatttttgtatttatttatttatttttttgtagatacggggtttcgccatgttgcccgggctggtcttgaactcctgggctcaatcgatcccgcgaccttggcctcccaaagtgctaggattacaggtgtgagccattgcgcctggcccaaatcattttaaatgtactgggagatgcactgataggaggccaaactggcagcaggactgcctgttagaagtaatcagatgatggtggcctaaactaatggagataaaaagatgtacacagagctctttaggaggtggactaagcagtactatctggttttaggtttaatgacagaagaggcctggtgcagtggctcacgcctgtaatcacagtactttgggaggccaaggcgggcacattacttcaggtcaggagttcgagaccagtatggccaacatggtgaaccgcccccccaaccccgtctctaccaaaaatacaaaaattagctaggtgtggtggtgcacacctgtaatcccaactactcaggaggttgaggttgcagtgagctgagaccacgccagtgcactccagcctgggcaacaaagcaagactccgtctcaaaaaaaaaaaaaaaaaaaaaaaagaatgacagaacaggctgggcttggtaatcccagcactttagggggctgaggtgggaggattgcttgataagcctgggcaacatggcaagactccatctctaccaaaaaaaaaaaaaaaagtgcaggaaatcagcctggtggatggtggtgccattcactgacatgtagaactgcaaatgtggcaaatttggtatgggaaggaaggggcatgtgaagaggaagatcatttagacttgaacatactgacacacagcagctattgaaacattcaggtgtgattgttgtagctggatgttggatattccagtctggagctctggagagccatctggcctggagacaaagtgggagtgagcagcgtgtttaatgatagacctggaaatggatgagatctcccagggataaggtttaggaaggactttttaggagcattaacacttaaaggatagacgtttaattttatttattcttcagaataattctgtcgaggtaagtagtatcattcagattttactgtgggaaacctgaagcttaaaaaagttaacttgtcaataagaaagctggttggtctgaggttcaaaccatatgtctatgagctcccaaaatcaatgctcctttgtatgtctcaaagcactgtacacagctggtgcttaatagttaaaatcttctatcacccctccccatttgacttgataacttaggaaggtaaaaggcatgaggcggctttcacagctgtgggacttagctcttgttaccttgggcagttgtacagattcctacaacctgtatttcagggtcgaagtgaaaatatttgtctatcactgagtgttttgtatatttatggctctcgatcaagagattatgtgtcaatgataataatcagctcttggctacatttcaattttttttcttttattttacttttaagttctgggatacatgtgcagaacatgcaggtttgttacataggtatacatgtgccatggtggtttgctgcacctatcaacctgtcagctaagttttatgccccgcatacattaggtatttgttctaatgctcgtgttttctttttttctgaggcagtctcgctcactgtaacctccacctcttgggctcaagccatccttccgcctcagcctccatggtagctgggactacagtcgcgcgccaccacgcccggctaattttttaaaaaaaattatgtagagatgggtcttgctatgttgcccactccagtgggcatcccaaaatgttactggcatcccaaaatgttaggattgcagatatgagccactgcgcctggccttttttaaaaaaagttttatccagtgacaggctgggctatacacttaatgtctaaaggtttttgcctttcagttcatatcaacgcgagtagagttagctagctatgtttgtaaacaatattccgatatgcttcgttaaagtaagccgatattaaacatttatataaatccatcctcacagggtcaatctggagataaactcaccgctgcagggggcggggaaggaggtgggaacacgctcattgacaacttcatttccatgagaatggttgctgtggtgattgctgcgtcttcccattggtcattgccgagcgtattgcggttctccgggagggttatattggttcccattccacagcggccgcaacgtgtcgagagccgtaagtaaagtgtcgcaaagcagaaggaaggcgggagtcccgactgcaaacattgaggaaagccaggcagtagaggccgctatggcgaacgttccgtgggcagaggtctgcgagaaattccaggcggcgctcgctctgtcgcgggtggaactgcataaaaatccggagaaggaaccatacaagtccaaatacagcgcccgggcgctactggaagaggtcaaggcgctgctcggccctgcgcctgaggacgaggatgagcggcctgaggccgaggacggcccgggtgccggtgaccacgccctggggctgccggctgaggtggtggagcccgaggggcccgtcgcccagcgagcggtgaggctggcagtcatcgagttccacctcggggtgaaccacatcgacacggaggagctgtcggcgggggaggagcacctggtgaaatgcctgcggctgctgcgcaggtaccggctctcgcacgactgcatctctctctgcatccaggcgcaggtgagagcgagcccggccaggccggcccctgttggcaaatggcgagggatggggaggagcccctgccaaggccaagggcagacgttgtaaggcgcaattcgtccccacgtttttgtagctctggactgagtcccaaagagcgtctgtggtcttcaaaaaagccagtcttatggacttattgccttgtaactagatctcccacagtcggccgtccccagactccgtgtccaccctcgtcgcccacaccaatatcgcttgctgctgcttcacttagacgtggcgatgcattggtgtccgagaccctcctacatcgtcatgcgctttcctctccaccagtccaactcctgttcattctgttaagaaaatccaaagtaatttaaatcttaacgtctcaaggaaatgacaatgaccggagtacattcttttttggttttgtcttgtttttgtttttttcttagagatggggtctcactgtgtcgcccaggttcgagttaagtggcaccatcatagctcattgcagcttccacctcttgggctcaagcagtcctcctgcctcagccttcatagtagctggaaccacaggcgcatgccaccattcttggtaatttttttaattttctgtagagatgggggtctcactatattgcccaggctggtcttgaactcctggactcaagtgatccttctggctcaccttctcaaagtgctgggattacaggcctgagccgctgtgcctggctcggaatacattcttaattcaaaataaaatgtccaaaatctgcagcttcctttcttaccaaattcatttgtttgcatcttagggaattcttccccattcttgaaaacctatctcaagaatcacttcctttagtattaataactttcttgggaccattttgggccaaactgatctctccctcctacctttgaattcttataatactttttgtttcccatttatatggtacttggtttcttaaataaatctgggcagggcacagtggctcccatctgtaatcccagcattttgggaggccgaagtgggaggatggcgtgaggtcagtagttcaagaccagcctgggcaacaaagtgagactctgtctcttaaacaaaacaaaacaaaacaaaaaacccacaaaactagccaggcatggtggtacacgcctgtagtcttagctactggggaggctaggttgagctgggaggatcacttgagcccctggaggagccatgatcatgccactgcaactgcagtctgggtgacagagcaagaccttttctcaacaacaacaaaatccacatcaatattctaaagtaatattggtcaacacctgtgaaaagaaggggtgaaaaaaagaaaaatactttaaaaagttaaaataatattgggacaggtgaacatggatgtttatcacagcagtgttgattattaaagaaggaaaatcgcagggctgaggcaggaggatcgcttgagcccaggaggtcaaggctgcagtgagccaagattgtatcactgcactccagcctgtgcaacagagtgagaccctgtctcaaaaagcaaagaaaaggaaaacaatataaatgtcagtaggaatatgattaaattccgttacatccaaacagaagaacagtacacaattattaaaaataataatttatattaacaaaaattggcaatatgaagagggaggaagaagactataagccatatttagaattatgtagaaaaggccggatgtggtggctcacacttgtaatcctagcactttgggaggctgggatgagatgatcactcgagcttaggagttcaagaccaa

SEQ ID NO: 94241 - DNA, 13529 bp, Homo sapiens
ccgctgcactcttccgctggcgtgctcccctccaggtccggctgcttgtgtcttcttctgctgatgtgttcctctcaatgtccaggcacttgtgtgtctgcctgctaggtctcgaggtttttataagcacagattgggggcatagcaggccagagtggtcttgggaaatgcaacatttgggcaggaaaacaggagtgcctgtcctcacttaggtccgtgggcacaggcccacaggtggagccctagccagggaccacaccctcctctacccagcacttccctgccccccttccatatgaatagtgctgtaaatgaaaaagtagatgactgatttttatgtagattcatggagctacaagtacactcagcctagacctatctgtaatctctttgtgcataccaaattttatggtagatcttaacatgtaagcactttcgttggtttgtttttgagacagaatctcgctctgtcgcccaggctgcagtgcggtggcatgatctcggctcactgcaacctccgcctcccgggttcaagtggttcttctgcctcagcctcccaagtacctgggattacaggcgtgcaccaccacacctggctatggggttttgccatgttgaccaggctggtcttgaactcctgacctcaggtgatccgcttgcctcagtctgccaaagtgctgggattacaggtgtgagccaccccgcctggcctcatgtgagcattttaattgccactaaaagatatgatgggctgtgattttgtttcatggtaaagtgagccacacagcaaagtacatttaaacacgctgtagcaagataactattcacataccatgagatttcatcctacaccagtcagaatgactactattaaaaaaacaaacaaacagatgttggtgaggatgcagagaaaagggaacacttacacactgttcatgggaatgtagattagtacaatttgatgaaaaagggtgtggagatttctcaaaggaccaaaaatagaactatcattcaatccagcaacccactactggatatctacccaaaggaaaagaaatcattatatcaaaaagatacttgcactggctgggcggggtggctcatgcctgtaatcccagcactttgggaggctgaggcaggtggatcactagaggtcaggagttcgagaccagcctggccaacatggtgaaacactgtctctaataaaaatacaaaaactagccagtcgtggtggcgcacgcctgtatccccagctactcaggaggctgaggcaggagaattgcttgaacctgggaggcagaggttgcagtgagccaagatggcacctctgcactgcagcctggaagacagagcgagactccacctcaaaatgaaaagaaaagatacctgtactggaagccctatttacaatagcaaagatatggaatcaacctaagtgtccatcaatggatgatgggataaagaaaatgtggtatatgtacatactggaacactattcagccacaaaaaggaatgcaaccatgtcttttgcagcaacatgaatggaagtggtggtcattttcttaagtaaaacaactcagaaacaaaaagacaaatactacgtgttctcacttataagtgggagctaaataatgtttccaaataggcgtagagtgtggaataatagacattgctgaccgggaagggtaggagggggctgagggataagaagttacttaatgggcacaatattcattatgccagtgatggacacttcaccactgcacaatctatctaggttacaaaatcacacttataccccataaattaatacaaatttttttaaaaaccaattacactgcttctaaaagtcataatttaaaaagtcaagcgatagaaaatgcatttgttgatttaatcatttgtctagttaataaatcacacaatgtctagtgtattgatgtagattgaactccacatgggcctaaattgtgttaatcccacttgctgaattctttactcaggcagggaggtcagaatgggaactcctggctacactccacatctcagcagggaacagcatgtgccgtcttgcctgtctgctcctgcagatcagtagcaacctgtctgaagtgcaaatagagaaccagtctggggatgtgtctgggctaagcagagaaaatcacttcgagaaatcactgatgtctgccaagggctgggagaaaggaggacaccggggcattcaattrgcacacctgccctcatcagtccgaatgctatttcagtgcaaacttttattgcattgtgtcttagtccatttcacgctgctgataaagacatatctgagactgggaagaaaaagaggtttcattggacttacagttccatattgctggagaggcctcagaatcatggcaggaggtgaaaggcacttcttacatggcgacagcaagagaaaatgaggaagatgcaaaagcggaaacccctcataaaaccatcagatctcatgagacccacccactaccatgagaacagtatgggggaaaccgcccccatgattcaaattatctcccactgggtccctcccacaacacatgggaattacaagagtacaattcaagatgagatttgggtggggacacagccaaaccatatcacattggtaacatgcttgcctgtgtagttttaggaatgtgcttctccagcctactaaaacctaattttaacatagactatctcatttcaatttttaaagatttttctaacagcttttttggggaaaaaagatttataccagtttatttactgaaacgaagataatagatttgtttgtaaatatctcctaattatgcaatatggaaacttcaaaggaaagtgagcgtctgtttgttgttgttgttttgttttgtttcgtttttgagatagggtctcaatctgtcacccaggctggagtgcagtggtgcrattgtggctcactgtagccttgacctcctgggctcaggtaatcctcctgcctcaacctcctgagtagctggggctgcaggtgtgcaccaccatgcccagctaacatttatattttttgtagagacgaggtctcattgtgttgcccaggctggtctcaaactcctggactcgagcgatcctcctgccttggcctaataaagttctgggattacaggcgtgagccactacgcctagcctccatttttaacatcttataacgcctagaagagatcacttgatttccaggcacatcgtgttctatcactggtttcttcaaaatttattagagcaattttrtcttgtgtatatttgttaataattgtatcacaaatgatttaatattgtaattattataatatttattgttaaaaatgcaaataatatatattatataagtatatgtgtctttaagtatattttataagttatataggtgtataagatatattataaaattatatcatattcatgaaatacacactatattatattatatataatatattgcatataagttacacgtggtggctcatgcctgtaatcccagcactttgggaggccaacgcaggtgggtcataaggtcaggagatcgaaaccatcctggtcaacatgatgaaaccccatctctactaaaaatacaaaaattagccagctgtggtgcggctactcgggaaccagaggcaagagaattgcttgaactcaggaggcggaggttgcagtaagctgagatctcgccactgcactccagcctgggcgacgcagtgagactctgtctcaaaaaaaaaagttacatatgaatatataacttgcatcataacataaatatctttctgtaatatgtaatatctatgttattgatgatatattcattctattatataatatattcatatattatatttatatatttgtatattatatattatacattcatttaaatatatctaatgtttatctaatcaagttatctaattatctaacttaaaaacatctaaataaaatttatattttatagtattatagcaatacatttaaatgtatcagcatcaatatattgtgtattatgaaatatttatgtattacaataaattcatatttattcaaacatgtatacatttaagttatgcacttaaatatgtatgaatatcttatgcagatttcaatattaattagataagcatgcaaacatattttccctttgcctttagggagttcattattctgtataagctttccttctttttcaactggaaaaagcataaataaacttgagttaaaatctaaatgtttgatctgtttattccaacatttcttacacttagtttatctgtctatggctcatacgacttacatggattgcttgaaagagttattggtagggttatggtaggtttattggggtaggggtttaagcagaattaaatgtaggaaactgagttccccctagaagcacaagcagagactaggatttgagggtaaggtgtttatggggcggtgataccaggaaggacccatcggagaaccagaaaatgagacagtggaggccccattccagaaaccttcattgagctaatccgagcgtttgacctggggctgcacatttttggcgaacacccgagttgtttctgaagcaagtagaatacggatcgtgcatctcccagaggatactctgatttgaaggaatctcctgtttacactggctcattggcttttttgagtgataaccctgacggggcccatgacaggtcaatttcaccttgagaaagagtagttcagggacactggctcttttgttaaccttcctagttactcacaagggtgcccaatggctcacaggtgagaagaccaaggtacagcggggggggggtcggcagtcaattcctaccactagaaatgactcacgttgtggcccagtaattcctgatgtacagtgcattattactggataaatggctgcctcctgggaagatagagagttcacaggccctcacccatttgccaacttattaattttctgtggctgttgtcacaaattgctataaacttagttgcttaaatgatgcaaatttattttcttacacttctacagttcagtaattctggaggtgagaagttcaacaagagcttcattgggctaaaatcaagatgtcggtaggctcagcgtcacgcaatgtaacaatgtaataaacctgcacatgtaacccttaatcacaagtacaagttggcagttattttaaaaaataaaaaccttcaccaagaatgaaaaatccttgtgaatttccttctggaatctcttttgaacagatgtatggtgtattcattttttaaacctgatctttggtctggtacaaatgttgatttttttcctaatttttacattaaatcattccttaaagtggttataattataaaagtgaaaaaaaaaacaatagcaaaaaggtgtcagtagggctgcattctattagagaagatgttgggcagaattcatttccttgcttttcaaggatggtggcagaattgtttcttgtggttgtagaatcgaggtctccctttctggctggctataaactgaacatcatttccagcttccagagaccaccatactcatctctcttcgactctggctcatgtctgccatggaatcttgtctccccctgatagcccagaactgccccaaatgctgaccaattttgacacacagagttctcaataggctcagctcctcagctgataggcactgaatccaagcacatctgacagccacaccaaggccatggtgctccaaaggagcattcaaagctctttcagtgtacactaccacactctccacccagtgtctgagcatggctcacgggcctggggcccgtgttgacccaaactcttggtcagtgtgctaacccacctgatatttctcattgattttgatgttgcctctaacctgaagggtattagtttggtacacttgctgtaaaaaattacctcctcttgctctatcacctgcctcaggtgcccggggtcctagtggttcactgcactgtgaagacagattccagatgcagggaactcacacctccaatcccagacgctgtgtccagcaaaggctccatggttctggcccacagtggtggcctggacacctcctgcatcctcatgtggctgaaggaacaaggccatgatgtcattgcctacctggccaaaatcagccagaaggaagacttcgaggatgacaggaagaaggcatggaagcttggggccaaaaaggtgttcattgatgatgtcagcagggactttgtggaggagttcatctggccagccatccagtccagcatcctgtatgaggactactacctcctgggcacctctctggctaggccctgcatcgcccacaaacaagtggaaatcacccagcaggaggggaccaagtatgtatcctacggcgtcatgggaaaggggaacgatcatgtcctgtttgagctcacctgctcactggccctcagattaaggtcattgcttcctggaggatgcccgagttttacagctggttcaagggccttaatgatctcatggaataygcaaagcaacatcggattcccatcccagtcactctcaagaacccgtggagcatagacgagaacctcatgcatatcagctacgaggctggaattctggagaaacccaagtaccataagcacctccaggtctctacatgaagactaaggacctcaccaaagcccccaacaccactgacattctcgagattgagtccaaaaaaggggtccctgtgaaggtgaccaacgtcaaggatggcgccacccaccagacctcctaggagctcttcatgtacctgaaccaagctgcaagcaagcatggcctgggccatattgacatcgtggagaaccatttcattacaatgaagtcctgaggcatctatgagaccccagcaggcaccatcctttaccatgctcattcacacatccaggccttcaccatggatcgggaagtgcgcaaaatcaaataaggcctgggcttgaaatttgctgagctgctgtacaccggtttctggcacagccctgagtgtgaatttgtccgccactacatcgtcaagtcccaggagctagtggaagggaaagtgcaggtgtccgtcttcaagggccaggtatacatcctcggacaggagtccccactgcctctctacaacgaggagctggtgagcatgagtgtgcagggcgattaggagccagttgatgccaccgggttcatcaccatcagttcccttaggctgaaggaatatcatcatctccagagcaacgtcactgccaaatggacccctatacaagtgggagctggggcctcctcactttgcagatcccccaagtacaggcactaattgttgtgataatttgtaattgtgacttgttttcccagctggcagcgtagtgggcctgccaggccctagctttgttccctggtccccctgaagcctgcaaaaatagtcatcaaagggaagggtggggggcagctgcagtggggagctataaaatgacattttttttttgagacaggttctgactctgtcacccaggctggagtgcagtggctcgatctcggctcactgcaaccttcacctcccgggttcaagtgattctcatccctcatccctcattctcattctcatccctcagtagctgggattacaggtgcacaccaccatgcctggctaatttttgtatttttagtagaggccagctttcaccatgttggccaggctggtcacgaactcctgacctcaggtgatctgcccacctcggcctcccagagtactggccttacaggcgtaagtcaacacacctggccagaaatgacaattaaaagaagattaaaaaaaaaatgacctcctactgggtggctgaaagcaacataaatgtattatctcccagttctgtttttttcaaaattcgttaatttttgtgggtacataggaggtgtatatgtttatgggatatctgcaatgttttgatacaggcatgcaatacataacaatcacatcacagagaatggggtatccagcctctcaagcatttaccctttgtgttgccaataatccaattatactcttttagttatttttaaatgtaaaagtaagtcatttttgatctcctagttctcttcttggcctctccctagcttccagtagccactggcaatccttggcattcctggacctgtggctgcatcactgcagtccctgtctccatctccatgtggccttctcctctgtgtctgtgtatcctcttccgtctcctagaaggacacctgccattgcatttagggcccaacctaatccaggatgatctcattttgagatccttgacttaggtatatctgcaaagaccctatttgcaaatgaggtcccattcacaggatccgggcattaggacatagatatatctttccaagaccacagtttaagccactacaggtgtccttagttccctctggaggctctaggggagggtccttcctgcctctcccagctcctgggggctccaggcatccctgggcttgtggctgcatcaatccagtctctgcctctgtctccacatggccttcacctctgtatctgtatctcctcttctgtctcttacaagtacacctgtcattgcatttagggtactgaatccagcatgacttcatcttgacatcccgtactaattacatttacaaagactcaatttccaaataaggtcctatttcaaaatttcgagcagacatggaattttttttagtggggaaggtggggagaagacacagaatacctgttgtgttccccgcatcctctggctcccgctgttttctcctagccagtgggatcctggtctctcacatctagccattacctggaatcttgcctgcagggagctaccccaaccccctgccctgactggctctgattgggttatgtattccccgtctaattgtatcaccacaattatcacaacgtatatctcatgatcatcatccccagtttagggactttaccttccaccatcctttcattaaaatggtttattaaggtgcttactgcaagttagactatgtaagtggatacattttaaaaataactgaattgaacaacataatttgacctcctactctctgtttgtcctagaaaaaagcagtaagtacacatgaattagagtcttaaaatatgagagcttttcaggttgggcgcggtggctgacgcctgtgatcccaacacttggggaggccaaggcaggaggagcacttgagcccaggatttcaagaccaggtgggcaacatgatgacacccctgtctctacaaaaaatacaaaaaaattagctggtgtggtagcacgcacctgtagttccagctactcaggaggctaaggtgggaggatcacttgagctcaggaggtggaggctgcagtgagctataatcagacaactgcattccagcctgggcaatagagcaagaccctgcctcaaaataaaataaagtaaaataaaataaaataaaatatgaattgaacaacgtaatttgatctcctgccctgtgtccatcctagaaaaaagcactaggtgcccttgaattcgaatcttaaaatatgagacctttgttctaaatgaaccacccacaatctccacacctgttgtgaagaagtaactaaaatgcccggattttgtttacttagcagaatcccctatatccctaagtgactcatagcctgttgctgttatgtaacagcttgctagagagactaaacatttcaggattgttaagggaacaaaatgcaagtaaggtgttcctacagaaacgttgcccctggctatgaacacctatgagacacttggaaaatgatgtcattttgttttgttttgtgggaagacagatacactgcatattgtccacatatggaaaccatagtctgagtatataacctgggtggccaaattagttgcaaacaaagatacagtagcaataatagagtgtaaccctgatagaaaggagaatgaacagatccacaataggtcagaagatctgaagttgcatccacctttattcattaggaagcctacaaaaagcaggaaacagtagctaatgtgcttaattcatgtttaaagagtaattgaagtaacaggtatcagtgtgttttcaaaagaaataaaattcaatggctgcagtttcctatctggttatataattcccatgtagttgtatcacccaattgatgactaagttaaacccacaacacccttgccaaggcctgcccagcctccagcgataggcagtgatatttcaattcgtttaggggtaggtctgttccacattccaccagctctattgtgtgggttttccttttagggagacaaaaatccacctctaggtaagtttcatggatcacaggtacaccgctagggaccctgtagaatgtctgtgatacttcgactacacagcagcccttcaaatcttaaatggcacacgcacaaaaataatcatgcttcctgtgtcttaatttggtttagaataaatatgcactcatgcattgttgaggttaagagtctgctatggtctgcatgtctatgtcccaccccaaattcatatactgaaatcctcaccaaaaggtgatggtattgggaggtatggcctttgggaggtgatgaggtcataaggtagagcctcatgagtggaatcagtgcccttagaaaaagggccccagaaagttctctcgccccttccaccatgtaaggacacagcgagaaggctccatcttaatccaggaagcaggtcctaacaagacactgaatctgcccygccttgaccttggactcccagcctccagaaatgtgagcaggaaatgtctgctgtttgtgagccccccaggctatggtattttgctagagaagtctgagtagactagaatacgttccttacaccaactttcgcttttctatatttcctcaaattcaagcactcagtgccaggagtatctggatgagaccaggttgcgaatccttactagacactgaatctgccattccttgatattagactcccagccccaggactatgggaaatcaatgtctgctgtttataagccatgcaatctaaggtattttgttacagaagtctgaattgactgggatacagtttcttatagcagcattcactctactatatgccttcaaaatggagcactcagcactgtgggtatccagggagaccaggttgggatgactgttggtgcctacacttcagctgattggagctgaatatcacagcacattgtttgatttagacaggtatttgtcagtcttggtttacattcaaccagttgtagacattcctaaaagtttttcaagccactctttcatctctgctcatcaggtatggtgtggagaggttcagaacacctgccttatccaggtgggtctgctatcatcacagggatccttacaaaagggaagtgggagagtcaaagctacagaaaagacacaggctgcaggctgcaggttggcatgatataatttgaagatataggaagcagtcatgagccaaggaatgtagacagcctctagaagctggaaacagaaagaaatcgtttttctcctaaaatactcaaaacacagctctgcagacatctttattttattctgatgtccaaaagtgtaacagaataaatgggtgttgttttaagcaatgacatgggtgataatttgtgacagcagccacagacttgcacactcatcgtcctgctggtcaaccttccctacaagagaaatgcaccccaggtcctttgcacctgctggcccctctgcttggaagcttctttctccaaatgctgaatgatttattccaacaccacctcctccgagtggcttttcayctgtccctttccaaaataatcttctcctttccttttgccctgattcacttttggaaacagttcctatgtgagtttagagtttattttactgcatttgattctctcactagaatgtgagctcaatggaagcttcagcgttctcacccatgaccctgtctagggttagggttagggttaggcaatctggagccatcaatagctattgaatgaacaagcatggccaggtctatgtttagagggtcaacttctggacagggacataatatcttcttaagcagcgaggaagtcagcaagagccatatatctgccatagggaaagagtagaagcacacatattgcaagtggaaatcagagttaggggacactccatgggtctctctgattctgagacacccgactgcatggtgagatattgtattagtccattttcacactgctgataaagacatacctgagactgggaaatttataaaagaaagaggtttaatggacttacagttccacttggctggggaggcctcagaatcatggcagaaagcaaggaagagcaagtcacgtcttacatggatggcagcaggcaaagcgagagcttgtgcagggaaactcccctttataaaaccatcagatcttatgagatttattcactatcacaagaacagcataagaaagacctgcccccatgattcaattacctcccaccaggcccctcccacaacaygtgggaattcaagatgagatttgggtggggacacaaccaaaccatatcagacttcttccataagtggttttggctccagacacacagtgaagtcacctgtgatgaccattaagctgactttggaagtcacctgtgagcttccaaaaacacctgcgcctatggttctaactacatagatttgacttcactggacctggatgtagtctgaattctgggagtgcaaatgttcttcttgtgagtctaacaacctctaaatggatatgataatgcctagatcccaagacagaaacaaatgtatagtgagcatcaaactggtttgggatgtgggaggcagaggatgccatgggtcagggaaaatgggagatcctgaatttgccaatctttcttataaagaaggttatattttcctcagaagagtaaatcaaacccaattttaaacttgatttagacaaaacatgtgtctgcacatgggtgtctatcccttaaggatgtaagagttgttgtactatccatctatatttatgacatatagttctctacagggagaaaaatgctgtaattttcttttatttgaggccaactctgttttttggccatgtgttcagccataagtggaactggctgacttttaattttccacgagtatcataaagaatagaaatggaaagtaataaagagaaagtgattgagtgggcaatattttccttttagctcccaaagagaatggccaatatttttcaaccctaaggaatgcctgtcatttattctcagaagcaatgtaggaattcatgggctacctcaagagatgccatgagaacaaaagtgtagacccaaaacaaaggtagctagtgtcagcacgtgatgtatgatgcaatttgaagaccagggagaatttgaagggataaaaggagggacattgtgtc

SEQ ID NO: 94242 - DNA, 43563 bp, Homo sapiens
tggcacatagaataactgatgattggagagtagggaaatgatttgattaaaatgtttagaaagctcaatcaagttacagaatgccctggagtaagatgagtcagtccatctcatcaagatgaggataaattgtaaatcatggtggactgttgcattttgggtgagttgctgcaggactcacagttttacccaaccatctacctgattctaggtgatttcaatgtccctgaagatgaatcaccaacatctcagccttgaggtttggttgttcatctgtattccaacagctttcccctcaattccacttcagcaacctattgacatggtgaccccgaaccatgtcacaaagcatggttcacaacattttccattgctcaaaccaaactgataaccccttctccaacatcaacctctgatccatctccctgtttcattctccctactcctatgacactgaagttggacctaaccaagtcttctagtcactgtacacctccctcttctaacttgagtccttgaaagggttccttcctttcctactcagtgtggatatgcagctactatcttactgcatcctcgaaccccttgttccttggctgttccagagaaaacctccaagtctggatcaatctgatctacctatttttagtaccataaaatattatgggccaggcatggtggctcacgcctgtaatcccagcactttgggaggctgagcccagtggattgcttgagcccaggagtttgagactagcctgggcaacatagtgaaaccccatctctatttaaaatatatatttaaaaattaattatggttaactgcttcagccatgtccccagtgccactgagaaatcttccttttctgttctgaagagaggcctttctcaatttttactatactccataccctttccatatattctccccttctttcacataaagaggtctcagctgattttgaaagggtggtccactcaagtggactttgaagtcttcggtccagaggttataactgtttagggtacacccagagttagcaatgaaataagaaaagaagacagagaagtgaacaaggaagtattagaagcagcaggaaaaaaacagttacaaaaagaccatggaggagaggatttctagaataaagcaatggtaactatgtcaatgtaacctgaaaaagtttgaggactatcaaaagactactggatttggtcaggaagtcatttatgacaacagtttctgtggaatggtaagaaattaggacgcaggagaataactgtggacacaagaggacaagaaaaatacaaaggcaaggagtccaggttatgtatccaaaacattagatatgaaaaagaaatcgttcaggaatcagaatagattacaggatcaaataaagacttattggtttttttcaagacagatttgatgacataatggagacagagccaatgcagaaatgttagaggaatgataaaagatgataaaaattgagtcaagctggctgaaaactatatgaaaacggacaatgtcacagacaaatcagagcaaaattttatcttcctgttttagttaaatctttgcctctgaagagatggtaactaactgtgtgactaagccctgcagggacttggcactgggactctcaacactcacatgcaagctagtcttactagatagaggagtggccttcctagagactagcattcatgatggtagatccactttagtcgtcatctaagttaggctttctgcagtagccaggaagcttcccctgactccatttaaattagtgcctctcaccacatacttccattacatctttaattctctcatgagctttagtaagttgtttattctccactggactgtaaaccctgggagggcagggactgtacctgctctgttttagctccaacacccaacacagtgggctagtacttagtaggcactcaaataccagctgaataaataaatgcttaaaaattattacatctggcctaggatctattatatctatctgggatctggtgctcatgatgcatgtcaatttagatgagtaatcactcttcaaaatactgtcagaatggtcttttcccgggaaaatgctgcatgattttgaaacatgtggtacacgatgaattgaatatggcaagttgctaaactgacacgcagaagcacacacctgaaatgatttaatggcactttcaaattaaatggtactcagactcaaaaatacatatctcaggcctggaagagatgtcagaggttatctaacacaatctccccttcactgaatcctcaaacatattgttcattagcctaacattaagtgaccagttagagtccattaaaatagcttcagtggtagaaaacacatctctataagaacacccagtccacttttggatggactagtcattagaaaattcttatttgtgatgcacacgtagttttcacccattagtccctaggtcattgtaactacagtgcagtctttccaacatctgaggaaggccaccatatcctctcccaaggcttcttttcacaactcctttaatcctcttcatgtgatactcatggcatttgaaacgaagtctacacacctgttttcttgtcattcctacttaaatggtatcatgagaggcaacagaattatgaaaaaaaatactaaaaagtataaaattaaggcaacttacatagtcacacgggaataaaaatagcagagtatgtgcaaagtggagatctattcatatttcttttccatctgattatgcttgactcttaatactctttttattctaaatttgaaatatccttacctttatccagtgttccacactgtcaggaccaaaagtaggctgtagataacatatatatgatatcaatacgcagcaatatctttatcaactttgccatttaaatctatccttctgactaaagcatatggaacagtgtcctttattatttccccaaagcatttcattagaaagttcagcatgattagcaataaaagacacagaatagcagtatgaggagaaaacatgaagccttcctgggacactgattgtttttatttcttgtctaggtccaccttgatattgtgatttaattggtctgggataggaccctggcactgctatttttttaaacctccttagggttaagagtcaagatatagaaatgctaaatataaagctactcattaaaaaaaaaaagcactgattaattagccagattatccaagtaatctttagcttaaagaagggtgtgttcctctccttactcctttcataagtagcctgtagcaagaggctttctcatcttacccagatcagggatcttgtttggcccaataaaaactgaaggttaaaaaatctgacttctactgttttacaaagcagaaaatataaatttccacccagatcagtcaggtattaatctgaaattagaagtaaaaccatcagggcatttcctttcttcactctctgtaactcctagaagcttggagaattccctctaatagtcacttaacaaatagagttatcttctttgccaaaaatgcaggtgtgttttggccgggagcagtggctcatgcctgtaatcccagcactttgggaggccaaggcgggcagatcacaaggtcaagagatcaagaccatcctggctaatacggtgaaaccccgtctctactaaaaaaaaaatacaaaaaattaaccaggcgtggtggcgggtgcctgtagtcccagctactcaggaggctgaggcaggagaatggcgtgaacccgagaggcggagcttgcagtgagccgagattgcaccactgcgctccagcctgggcgacagagcgagactctgtctcaaaaacaaacaaacaaacaaacaacaacaacaacaaaaactggggaatggggcgagggttaatcaatctgacttttactgttttacaaagcagaaaatataaatttccacccagatcagtcaggtattaatctgaaattagaagtaaaactatcaggacatttcctttcttcaacctctgaaactcccagaagcttgcagaattccctctaatagtcacttaacaaatagagttatcttcttcactaaaaattcaggtgtgtttttaaaataaggggatatcctgatgatttgtcattggagcactaaatctcttttggtttggcgttcccagttcatgaattgcttcttactcaaatatactctttaaaataataataataataataataataaaataaggggatatctaaactagcatactgacacatggaggtgggaaaaatataatactctttcacttacctaacactttaccttcaaagcatcttactgataactaacgcagctgtactgcttaataattttgtcactgcaacaaagaaagagctgatctaattaaaatacaactgaacttgaagaagccctatgtttttacctttttttctctaggcagtaataatgagcactagcagcaaaaatccttccttttggagtcctaagaaattattctaaatttttacctttcatcatcaagtccatatctatatcctatcttggatccaatacattatgcaactgatgtattgaaatagcagcagcctcagtttccaagtctccctgatgcttcagtctgtgccctctagtatctagggcaacatatttgtcatgtggaatatgtccaatgcatttagctggtaaatttagaataaatcgcaagaacaatcgcytggggccytcaaaaaggccacatacatctacagaatattatttaggaaagtataacttaagggtgaaaacagctggtgaaactgctctgtagctgaaagctgagaagcttctccattttagtactctcatttagattttaagcatctttttggggactgttaaaaaggtagtctgtggaaagcacacggtgcaactgtgactttgcacatgtcacatatgtttcaagtttaaaatggggttattatttttttcttatcttcaggtgctaatgcatccaaatgggtgatagatacggagagaatctattttttgaaagttggttgaatttagaaattactatgtgaatcaagtattaatgtattcaatatccatttgcactcctgagtttatttagatactttacgtaaaagtgaaggggcaggaatataggcagggtatttaatgtgaagctctctcccgttaataaagatcaattaccccaagatttgcaaaaaaaaaaaaagagagagaaaaagaaagaaatgtgcgagaagtttcctaaaatttaaggtagggggaacggagtttgcaaactcctttcaccccgatgggcattagcagacacctccggttttagaaaagcgttacaaacagttcttccacgatgctgcccaccaaagccgtaatgtgcccagaccccagagctcctagagcatttcactcagggtaatgctggctttggggcggtcaaggcaggggcgtgtcagctcaggatgaagaggcaggaagcacagacgggccgcgactggcttcctgactgcgccgcgccttgggaaagtccccgccctccaaagctctcgattgggatcaccttgggactcggcttccttgtgaaccgtttccagcgattcagccccatccttttctttgagaaggaccttccctgaggcgccaggagcattttccaagttcgagcccgaacctcggccaaagctgcagcaaccgcccttctgcccgggctgcctccgggtcacgctgggaattgtagttcctccgcccgcaaggaaagcaggcataggacaccgtcgaaccaccactcccacgaggctctgcgcaggccgctcgcgttggctcagttaccatagcaacggcagaggtccctcgctcttgccgtcatcaaggctcgcttgaatgtcggctttgctttttttctggcgcccagtgatgacgcagtactccctgattggctctgcactggaggcagtgattttggggcagagaattttgcaacacgtggtagtgaactgtgaggagtttgaggggtctgaagactgaaagagtcgaatggtttgttggcaggtaagtgcccctttgccctgctggtgtgggagctgctagagatggatgagtcacgtcgcgtccagacgcttcctggttgtgttgcagtaacggtgattgtactcccgccatgtctcctctgcttcccttttcagggtgtcctggtggattggtttctgtaagttcagattctcataaatcgtgtgagcgtcgccgacacctctgagataaaagggcccctttcgactagcctctgctgaaaggtagagttttcaggaagtttttattccgaactgcccatgggagggtgggaccgtcttcaatctctgagccaggtgcctagggaggtctggggccatggagatggcccatggagcaaagataaatccaggcttattggcttagccgaggtgtttccagagacagcccatttaggggtgataaatgggcttataaagcagagtaaagatttagaacaggagttttgaattcaactactttgtggctatatgaccctaggcaacttgtttaataactcagagaccctgttttctcatgcaaaatggggacgataatacctgaatcactggagtgttgtaatgattaaaaataaatgtatgtgaagcattctgccaggaaatgtaaactaaagttgatttgaaattggtgaaaatgaagttagggaagctatgccctcggactgttgcagcgatcctaggaccagcwctgtaactggtctgtctgaaaggcggttgaataaattgtgctcatacaaactatgcagtaccacgaagtagtttttttcaaaagggtaagttagctttatgtctcttcttcaggaaagacgtctaatgtttattcttgagagaaaagcaaattgcagagaagtgcatatattatagtataatatgtttccatttttgtaaaagcaaaccctgaccaaaacactccctcccatatgcaagtatgtttaaatatttgtatgagaatggagaaagattgcagagactgggaggatggattagaggcgggagggagaaagggaaaagaagaagaacactatagcaaaatggaaactaagattataatgtgcttgtgtaccagatggaacttctaataagctcccagcctattagagtacagcgctgaaaactagacttcaataattaaagtccttgctctgccacttaccagctggggattttatcagcctcagtttatcatacataaaatgcagataataatggtatctatattatgcatttgatatgaggattaatggagtgaatatataaagaacagtgcttaatacatagtaaatacccgataaatgttagttgctattattgtctttctatatgtgaaattaatttaacttttattgtgattactgacatttggaattctaccatcttattttgtgttttctatttcttttttttggtctcttttcctttcttgccttttattaggttaattcatttttctttatcttcccacttccctctccagtgagtttggaaattatgcattctgtcattaatcgtttaacagttacttctgaatttttaacacacatactcaacaaagtttaacgtcgtcgttatctctttccccctaccaaatggtgtaacgatttccgaatgccttggaaaaatcttcatttactgttttctagaattgtagcgttcttcatttcttttttttgagacggcatcttgctttgttacccaggctggactgcagtggcatgattttggctcactgcaacctctgcctcctgggttcaagtgattctcctgtctcagcctccggagtagctggtattacaggcatgtgctgctacacctggctgatttttgtgtttttagtagagacggtttcaccatgttggcctggctggtctcgaactcctgaccttaggtgttcctcccacttcggactcccagagtgctgggattacaggcgtgagccaccgtgcccggccagcgttcttcatttctgtgtgtcatttctgagtcagctcaatgcaccacattgtttaaaagtccttcagtcatttttctatgcatatactatgattatagaaagtgtacatgtgtgggagagaggggtaagagatgctgatgtgtacttatatatacagctttcctttcacaaaaaatatgaccatcttttgccttaggaaattttggacatttccatggcagtatgtagagaatccagctaggaaacatttaaaaatccattctctcctgataaatgaagagtggaggtggtgggtcgcactggaagtgttaggacaggtacggtgttgccagaagtgcagggaatctttgttagtccttgtaaaggtacagatccactgacagcctgtcatttgtctttacactcttaagggtttttccttaagactttctcaggaatgccatctgtgacaccagaaatattagagcagacccacaacaagtgaaaagggaagggatcatgataaaggcaaataaaaactagttagtattttggagactgttgatctgtttcttgaactttccttggcaaaaaaggaaataatcactctcaaagcatgtttttaaaaatatgtacatgaatatgtgtatgtgtgtgtactattttattacttcatagtaacaatttattgtatttgagcctctagaaaagaagtgtaattataaaaaacatttaccataacctgaacaatgaatgaagaaaggaagacttggttcttctagctctggacaaaattccatttttttaaaaaaaatattgatttccagctgaagtatagtacatctctgatgttttcctcagattttaaaatatttgcattcatccccacaaaacagaatcactgaccatggcagtttattttaatactttttcttaaacccagtcatctgcttttgcttccttatttttctcttcgttaatatgttgagttactgtgattagggtggaacttttatgaagccccaaacaacagaagtgagtatgtagcaccaaaatcgttcactgtagagaaagccaagtaggtatttctctccagctggctgagtgggttcagtattctaagctgaggattttgaatttcatctttaaagttatttgggattaaagcattatatcacaggagagcccatctctgcctctaagaacatggtggccaatgtcctttagagttacaaaggacctctaattacagactttcagttaagaatcaagaaagttgtttcttcagttgaggaaagagtgggaaggggagatgagagggaaggggagatgagaaagaagagagaagatgccttcaggactgagtggatgattaatcacacttgagactcgtttgttaaaagatgggaacttctagaatatgttcattctttccttacacaaggatgaaactaagaagtctttgagagaaaggtaagtcttggaagccaatggtctgggcttccaggtctggctgcctttatactcttagagaatccttgtgtccaaccttggagaatctgagattggttgtttggtcatcttcgcttatctgtggggaatatgttccaagaccccttgtggatgctggaaactgcaaatggttccaaaccccagatagataggtaggtaggtaggtaggtaggtagatagatagatagatagatagatagatagatagatagatagatagataagatagattagatagatagattagatagatccaaaccctaaatagatagacagacaatagacagacagtatgatgtttcctatctatacatacctataataaagtttaatttattaattaggcacagtagtagatgttagtcacctcggcaaacagtcttttttcttttcctagttggagaactttaaccttttctcataagggatcactttatggcttccctttggcatatccgtattgccagcatcacaactcttgtgctgtggggccagtcgtaagtaaaataagggtaacttgaacataagcactgcaatacagtgacggttgatctgatcaatgtgacagctcctaagtaactaaggggcgagtggcgtctacagtgtgaagatgctgggcaaagggatgattcacgtcctgggtggaacagagcaaaatggtgagagatttcattatgctactcagaatggcatgcaatttcaaacttatgtttatttcaggaattttccgtttaatatgtttggacctcggatgtccatgggtaactgaaactggaaagcagaactgtgaatgggggtactgtgttaagaaaaccgatgggtttccttttagttgcctttatgtaccttcttcttcccattctgattctatgcttgcatggcatatttggcttcatgtattgcattctatagggcaaacatgccactgactgatccactttgcttttttcgattctcagagtaaataattgtgcatactgattttattgtttagtctctgaggttgataggtttgagcctgaccctgagtgatggctctgtgctgggtatatagaaaagatcaggctcagcttaccaggcagaagcctaaatcccttaccagtggccagccagccctccaagcagtacaagactgtaaggcactggagggagcagcagcaggtggctaatctttgagcccctgtgtaattctgttggcacaggttaaagaacttgacagctgctttcttttatctcttttctttctctttcttttcttcttctttgtttttaagacaggatctccctctgttgcccaggctggagtgccagtggcgtgatcatggctcactgcagtctctgcctccctggcttaagggatcttcctacctcagattcccaagtagctaggactacaggtgcatgccaccattcctggctagtttttgtattttttgtagagacagggtttcattgtgttgcccaggctgctcttgaactcctgggctcaagcgatctgcccaccttggcctcccaaactgctggaattacaggcgtgagccaatgtgcccaaccaaagccactttctttttatgactttccacagtgtgttctaggggaaaaaaacaaaaagatgtttcatagatttcacatatacttttgaaaaatcttgttattttaagtggccatggtatgctgcaggatattctaaaaaaaaaaaaaaaaaaaatctgaatgcatctcctagcatgttaaatttactctcacataaaagccataattggatgggtgcagtggctcacgcctgtaatcccaacactttgggaggtcaaggcaggaggatcacttgagcgcaggagtttgagaccagcctgggcaacgtagtgagactccatctctccaaaaaaagttttttaattagttaggtgcagtggttgggcacctgtggtctcagctacttaggaggctgaggtgggaaggttacttgagcctgggatgtcaaggctacagtaagccgtgattacaccactgcactccagcctgggcaatagagtgagaccttgtctcaaaaaaaaaaaaaaaaaaaaaaagaataaaaagaatacaggccttttgcaggaggcccaggttctagacaagcctatgactaagcaggcctagtctcagactgattacaataaaatggcagaaggggtgatgtggtgatgaggaattcccaggtaggggtctctggtagtaatggaactctataaactattttcagtatttctaaagtctaatggtaattatacaatactgggatattaagcacagttttactaaagcaatggggtttgttgtttttacctggaattcagttaacacaacatggaaaagcagattatctcatgcttgtcagaagctttggttgtcagtcatttgtgtcatttattaataaactggagaaacgagagcataaatttgatgaggagagataataaaagtaacattctagaatcctatacttcatttttcaaacgtattagttttacccaatgaaggttcttcgtgcctttatatgaatttaatttaaaaaacactgttcatgkgtgtacatttaaactctttacatactttacacagctcagatgagagagtatttttggagtaagatagaatttttggaggagccagcaagttcttgtctctagccctttctgaaatagcttcgggcaacacagtttcttccgttctcagacgtatgtgatagtaggaaatgcgtaagttactgcagcatttaaaaattctggtccgtttaattttcattagttcttatttgtgtttcaagaaatctagtgttccatattggttgatttcaatattcagtcagaacaacaggtrttgattcatgaagctttgaagtacatttctcatctttgtgcttccccctgcttcaattctccagagctacttagattacaaaagtctgtcttaaatttcacattagaactctgttggtttaaaatataaaatacatttttatcacttgaaatcagtattatctgataaataaataaagattacaattcttttatattttctacagtatgcttttattagcttataagtatagttttacagttttcttaaatgaaccttcttgttttagcagttttaatgtgtaacaatagggtatgtaaaaaaatagcttttatactatttattaaaatataacctttttttccttaccagtctccatttatgtgggttctaatgacacttatttgtatgtttctatcttagtgataacttgaaataatgatctcatagttatagaaaattgaccaggctttcatcaaacacttatattagtttttataatttgtgtttagcataaaatctcttcttagaccatatagaaagtagttattctttttttttaagaaagtagttattcttatgtctaagattctaatgacaaagatggctattttatttaaatttaagaatttatgtctcctaaaaaaaagtaatgtttttattcttgaatatatttaactaatgatagatatgtcttatttatttggtgacattttaacaatggttgactttcagagtatggtatgctataatgcttaagaaaatgggatctggccgggcacagtggctcatgcttgttacctcagcactttgggaggctgaggtgggcggatcacctgaggtcaggagttcgagaccagcctggccaacatggtgaaaccccatttctactacaaatacaaaagtcatctgggcatggcggcacacacctgtaatctcaactacttgggaggctgaggcaggagaatctcttgaacccgagaagcagaggttacagtgagctgagatcgcttcactgcactccagcctgggtgacagagcgagattctgtgtccaaaaaaaaatgaaagagagaaaagaaaagaaaattggatcctctctgatagctcatttgtcaactaataaaactgggcctggcccagtttttaagaattccagaagatatggtacttgctgtagagatgtaatgaagtatttgtaaaatgttggtatgtctggtgacatttagccgatgatgtgtgtgcttatcaagttctgtagtgcattttaaaagtggaacccagtattttgcttcactgaatactaaatcatttaggagcacccaacaagtaattgataatgttttctgattttttttccctgtatatctatagaagttagaaagtgtatctttatttttttctttaaacacatattagtctttcccagttataaaagtaatgacactttgcttatggattgcgtgtatgctccacacagtttctcacttctgtttggataccatataagaacaaattgggaaataatccgacctcagagatctgtttatgttttgacatttatttttccatatattttcataaacaccaggatgctcttttcttcacttaacagcattattaggaaaaaattgctatattgcttagccttccctcaaattggagaaagaaaaaagtggattatatcaataatcagtatggcctaagcagtgttactgttctctgtatacattttcaaggctgagagagccttggcttcatggcattctttccatgattagtctttctaattctgttctttcatttgtttggttttcatcagctcagacaaaaattccatgactaaatttaaaattagttgatgccaatatgtggttctgggaccttagggaagatgtcttattctctttatgtcttttcccattcccccgttcctgatatctatgaaaatatttagactggaagcagtaataagcatgctatcrttcattttcctgaagattttttttttttgcaaaatgcttggcctctaggtgttgtgaagctccttctatacttaatgctcttttcttgacaggacctagaagaatcccttaggatgaagctgagtcttaccaaggtagttaatggctgtcgcctaggaaaaataaaaaacctgggcaaaacaggggaccacaccatggatattccaggctgccttctgtataccaagactggctccgccccacacctcacccatcacacgctgcataatatccacggggttcctgccatggctcagcttacgctgtcatccctgtaagtgttakaaccaatgattcaagtatcaactgtggcagcagcttagttaccttaggtgcaaaaaagagaaatatttttttttgttcatatatataaattgtcgattttcataatgaaatcagaagagaggtttcaaatattatacatcttctggccctaatctggaagccacaggccagacctatatgttagatctgcttcacttttcctccaaacctacagtcccatactgccatgtcgccactgctcccaggggtgacagggcggggaatgttctgtgagagctgcatttggagttcaggagctgttatcatgcaccagcctcaaagttttttctgcctttgcacatatacttgctaatactactttatggaaacagaactaaagttagatcattttgtgtaatgtatatactgactttatacttaattgaaaagcctactatatgaccaattaacakaatagtctgcagcgttgtgttaacaacagagattttaaaggggcaagagaaggaagaaaattcaagtattctgaaggagttgatctttgccagtttcatgtctcacagaaccactagcaagttgaaggccttcgttctggctaatgaacctagcctaattagttagaactcttgaataatggtgtaattcaagacagcatttaccatgatgtaacttatttgggtgaggagaagagggctccagttgtacagagtatttacagaatgacacattattatgttatgtatttttctgttttrcttacagagcagaacatcatgaagtcttgacagaatataaagaaggagttggaaagtttataggtaaaaattaagttacttatatgtgccttgtgatgtgttaatttggagtttggaggtgctgttacctctttgatctttcattcatatgtttgtttattcataaatttaataagtattatttgaacatctaagagccaggcattggcaagtcaagattgaataggaaacagttgctgctctcatggaatttggagcctagctgggataaagatagagaattctagtaaaaattgtggttactgctttacaggattagggatatgtatggatatcatgacaggccagagggcagagcatataacctgctctagggtatatgtgcaaggtggtcagaataaaaaacggattcttttttttgtttacgcctccataaaaacccagagaaaggattcttgagagagaagttgaggggcattttagctgggtcaaggaagagtaaaagttacccaggttaggagtgggagcccagacaggtgtggggcagatgctgcaggcactgagtatctgactcagcggtgagaacttgcatggggcattcgtgagctccaaagtagtctcatcatgcttgaacctcaaacatgcaggggaggatgaagcgtttgtatatggctgtattctgatatgttaatattatcctttattccagaaataggattttatatgcagatgtatgcatctatttatttakaggaaaagcttagcagtgacagctagaacatcagttcttctatacaccgctttctcctaacgctttttctggtatctaggactcacttgaatgaaaatcctgtttccattggttattcagtcttctgcttctgagagcagctgcatgatgtcctgttggttatcacaaagccctgtattttagtagaggaatttatggaatatcattctccttgacctgagcccaattttaataaccagctttaaagtatacaagcatataattaaatgaaaatagctaatgtaggctttctagagataattgtaataattgaaattatggaaaataaagtgaaaaaactgcagaggttttacacttgcttttttttcactggaatcctgttttattttccttaacgaaaatgtgggctagcatatgatatttargcacatggtttactaaactttttttgcattttttaaaaaatgattgtctttttgactgaagaacttaagaaactgtcatcgtgaatcaatgaaacttactaagaatgggatccatttgcagcatcctatagcttctctaaaattctgcccctagggacccatgatattattgagatttattattagtgagatcactttgtgggcatrtcattttatctttgcggtagctagttccccttggatggtacctggaataagcatatttgatagtaaattctttaagtaaagtcaaatgagatcaacatgtcactaaatactttcattgtatattgtgctttaagatacatctttcctttgtagcagctcagtacctatttattagacgtgaagctttatatttctttctttagattagtaatctttttatacatattgataggccttctctaattccaagttcagatacaacctattgacagtgtttagagttgctttattcagcagtacacattgcgaagctgctccctgctataatacagtgtcattgttgatgtaagcactttcaagggttcttttttgtgtttatacaggcatgccagaatcactcttgtactgctccctgcacgatccagtcagcccctgcccggctggttatgtaacaaacaaggtgtgttttcagaagggtctccaaggctgcagctttgtcccaggaagtcagcctatggtgtatccctcagatgctcagatcccactgtctgggatgatcccttataccttttccttatttcgataattatagtgggatggratggtttataagacttagagtagggctgcctaaggatgaggttaagatgaagaacactgtatcctcagcattttcattgttgcaaaaaaatttgagggtagaggagggtcaaatacatgccaaaaaaagaaattgctatgataggggaaaacgatagtctttcggcgccatgctttgttggatttttaacaacttcaggaagagtggggaaagttgctgatgagtattatcacatgtataactatatatagtagaatctcaatataatattgtctgctgggtctacagccagagattttgtctagtgaagaacagtatcaaaagcacctcattaaaagtgttaggctgagaggtggccccattggcattatccctgaggacagcattctggcaaagcttcagtgtgtactgctactttacaaacgcaaatacttttcctgcactcactttattaatgtcagcaatatttattaattgtgcccctcagaacactgtttttactcattctcctgttttaagtttctatttattttgtagtttgaattctagagaaaatactttggctgggtatggtggctcatgcatgtaatcccagcactttggtaggccaaggtgggtagatggcttgagcctcaggagttcgagatcagcctgtccaacatggcaaaaccccatctctactacagatacaaaaattagccaggtgtggtggcacacgcctataatcccagctacttgggaggtggaggcaagagaatcacttgaacctgggaggcagaggtggcagtgagccaaagtcgcaccagtgcattgcattctagcctgggtgatagagcgagactctgtctcaaaaaaaaaaaaaaatactttgacttccattttctacccaaattgtaagggagagaggaatcatttaaccagtaattctgatgccttagtataaaataaaacgactatatgttggcctgccatctatgtccttgttgatctgagaagagggatctgtagggtaaccaaagatagaatttttttttccctttttttaacttttatttttgtttcgggggtacgtgtaaacattgttacataggtaaatttgtgtcatgggggtttgttgtacagattatttcatcactgaggtattaagcctagtacccaatagttaccttttatccttctctccctcctttcacccttcactcacaagtagaccccagtgtctgttgttcccttctttgtgtccatgtgttctcatcatttagcccccacttataagtgagaacatgtggtatttgattttctgttcctgcatttgtttgctagggacaatggcctccagttccatctatgttcctgcaaaagacgtgacctcattcttttttatggctgtataatatcccatggtatatatgtaccacattttctttatccaatctatcattgatggacatttaggttgattgcatgtctttgctattgtgaatagtgctgcaatgtacatttgcatgcatgtgtccttatggcggaatgatttatattgctctgggtatatgcccagtaacgggattgctgggttgaatggtagttttgcttttagctcaaagatagaatattactaatatatactctcttgaactaggagatttaagtctttaattctatatctaactcagtctagtaaacactagatattaaaaatgtatagggccctagactgtgcttttgggatacatacatgaattgggatactctagtcagacaaataaagaatggtgtaataagtgctatcatttctataaagaaataaatacaaattgatgtaagagcatagaggagtgagtgatcgattatgtccaggaggtttggagatcagattaatatgtgaactcagtgtctcaatggacacgtagtattttgccaggcaaagaagtagaagttccagcacctagaaataataaatacttgaggtgatggatacttaaatactctgacatgattattacacttgccctatatgtaagatgtctcacatgtaccccataacattatacaaatatgtatcaataaaaaaaagaaaaagaaatacggaactgtcagtcaaaaggaacagtgtgatcaaagtctgtggtatattcaggaacagcaagggttaggtaggggtggggcaggtgggataggggagagcagaagatgttagaaaagtataacaaagaattcttggtgggtagctcaaaagttgtcttatatgaccactgaaggattatctgtaagctataagatcctattacccaccatgtctggatattgaattgtcaccatctctgcagttgtaaagaagaattattgctttatcattttaattattttatttttatttgcattttactcttgctaattcctcatcattttgctccatggcagtctgtgtctgtgtggagtgttgcaggacgagtggaaatgactgtttccaagttcatggcaattcagaaggcccttcagccagactggttccagtgcctctccgatggagaagtatcttgtaaggaagcaacttccataaaaagggtcagaaagtctgttgaccgatcacttcttttcttggataactgtctgcggctgcaggaagagtcagaggtaaggctgtgccactaaccactcctttctcttgacactcttgcctcccttacattctgtgataccaccttttctgttcttcctcctactgctgtgctcctcacttctttgtctattttactctctatttttattttctttttgaaccttaagtattattgttctctaggtttctatcttaggtttctcttttcatccctttctatatgttgtccctgggcagccttcccttagttttaattgctgaataattcttaaattgtatatactatcaagattattctacttagcttcagaattatgtaattactgggctataggtaggttatgtcactagaatatccctcaaactcagaagtgaccggattcatcattttatctccacaaacctgttcttgcttttgctcttcctcaatactttatctccatttatggcatccaccaagctcctcagcccagaaatttgagcttttctttttcttttttgagtctcactcttgcccaggctggagtgcagtggtgctatctcagctcgctgtaacctctgcctcccaggttcaagggattctgcagcctcagcctcccgtatagctgatattacaggcatgcaccatcacacccggctaatttttgtatttttagtagagaccgggtttcaccatgttagccaggctggtcttgaacttttgaccttagatgatctgcccgcctctgcctcccaaagtgctgggattacaggcttgagccactgtgcctggctaagaaatttgagcttttcaagactcctttttttcattcacatttaatatcccactgttcactcttccttgattccatttgcctaaatatgtctagaatcttcccctccttattgccaccttaagccgtaactgcatcatctcttacgtatgtaattacctttgaattcttctctctgcctccattctcatttttatccaatccatctttcagccctgttatccaaaagatctttgtaaagcacaaacaagagctccttgcccacttccctaaaagaatttaatgactctccacttcaactcttacatggcatggacagcctgctgtgatgtggcctctacctactcctccagctcactgtgggctactttttcctgtgacttgcactctgacctttctgagttgcttggaattccttgaggcattagcttgtttcattctgtacacggatttccttctggactgtttcttgtttctgcttttcttatctctagctatattccctcttttgtttccacatgaggctcatttcattccatgtatcattcattttttttttcttttcttttgagacagtctcactctattgctcagcctatcaggctagagtgcagtggggcagtcttggctcactgcaacctccaactccaggttcaagcaattctcctgcctcagcctccaagtagctgggattacaggcatgcgccaccgtgcctggctaatttttgtatttttagctgagacgaggtttcacsatgttggtcagactggtcttgaactcctgatctcaggtgatccacccaccttggcctcccgaagtgccatgtgtcattctgtagaactggttcctgatagttccagggaattcaattcattctttgctacccctttaattagtatgtagctatattttagccccaatcatattgtatttcaatgatttctttatgcatttgtcttcattaaactgtggcctctttaagctcaatttctgtgtataagttgggtatcttcatcatgcagcagaatgccttccctgtcttattcactggttcctcttattctgaatgcccttcaatattgaagctctccaagattcggttgttggctttcttttcttctccatatattacctgggttagggatggcgaatgggtttcatctgacatattgtaagccctcagtaaatgtttgctgatggtgaatggttatgatggggtgaagatgaagctgtagtggtaaatcagggatactgatagcagagttaattaagtgggaaaaggattcagagaacagtagagatgagggaacagaagatagtgatcagaggagagaattttaatatttgagatcatgtatgtggagtaatcctgagcgatgatcacatcccactatggcaagcgcattgagtttgaggaacatcattatattgaatttagcaataaaaatataatttggctaataaagttaatataaatgaaataattagaggaaacatagttattctgaatagaattcacagtatatgtaacaagagtttggtgtggggacattgctgtgtgtctgggcagttagtgttggtggcttgctagtaattgttttgagccagtcattatccttgtaggactagtaatgtttgggtaagtagaaagcaggacagcgagtgtgacaaagatgattattagaaaggtcagatgagcctcaagtccctcatctgtgttgttgcagtcagcctcatcatttcatattacttctgcatatttgtgggggtttttttgttttgttttgtttgtttttttgagatggagttttgttcttgtcgcccaggctggagtgcagcggtgcgatctcagctcactgcaacctctgcctcccaggttcaagcgattctcctgtgtcagcttcctcagtagctaagactacaggcacacgccaccacacccggctaatttctgtattttttggtagagatggggtttcactgtgttggccaggctggtcttgaacccctgaccttttcattcgcctgcctcagcctccccgaatgctgggattatagatgtgagtcaccgcgcccggccttacttatgcatatttattggtcaaacgtgtagtccctctccataccctttattattgtcttgacatgattattaatagtgccccccccattcttccattttagataataaattatatgatcgtgcttcttacacccaggaaagggagtttcccgaatagtcatgctagtcgtataagcaggcaggcctatgtaactctctgctttgtgtttctgcatacatcttttcccatgattccctccctgtcttattgactggctcctcttattctgaatgcccttcaatattgaagctctccaagattcggtttttggctttcttttcttctccatatattacctgggttagggatggcgaatggtttcaaccgaggtggtcgggtgcagcaagaagagagtcatctgttagtcacatctgctgtggaatcaggagtagagagtggtagcatcatgccaagtgtctgccattctagcctgggcaatcatgtttgtatcacacatagccttatctttaggttcatttaggttcagtggctgaattaagattgccatttggacatcctgctgattcctcaaattcagaacacacagaacagagtaatcatcttgcttcatccactgtttttctaggagtccctgccttttgctcttatcaccatctacctgtacttgcaaaacaggagccaggagtcatttgagactttgtctttatcctctccttggacaactaatcagtcaagttatgttgatcctacttcctgataggtttcaagttttatctttcctcttcatccacactgccactgccttagtccggatcatctcatctttcacctggatcattaaagttgtctgctattccattctttaatcgtactcacccttaatttatttttcacacggcagccaaagtgttctttctagaggaatagtctgattatgtccctcctgcttaaactaaagagtgagattctctcttcacagtgttccaggcctcctctccatccctttcttctactggagagccattgttgatttgtgtattttcttgcaaaacttattttttgcaattacatacacataattaatacatagatatacatggctgtattacatcagtatgatcatatattcagcaatttgcttgtttttcatttaacaatatcctgaaactctttctctataaatgcatatattgctattatctactgcattctttttaaacagctgcgtaggaagccatactgtgtatatattatgatctacgtaagcctttactctatggataaacatttaggttgtttccagtttttcattattctaaacatctttgtaaataaaccttggcacatgtgaatgagtataggagagattgttagaagtggaattttaggatccatagataaaagctggacatttcaataagtgctgtccactttccttcctaagacgttgaaatgatttttactctgtgtttatcaggttatgtacgtaccatttcccttacagtttcacctctactatgttgttatctatgttttaacctttttgttattatatgggcaaaaatggtatctcgttgtttccaattttgcattaccttactaacaaggtttagtagttcttcatacgtgtatagggcattcacatttatttgtttgaatttcatatttacgtattgtacctagatttctatgaggttgtcattcatttctttagagtattggttggagctcattttatgctgtagatatttaaatattcctccaaagagtaagttctcctttgcctttgttaatggtatactttagtagagaagttttactgattttttttttttttttttttttgagacagacccttgccctgtcatctaggctggagtgcagtggcgcaatctccactcagcgcagcctcctcctcctcggctcaagcgattctcccacctcagcctcccgagtaactgggactacaggtgcatgcygccacacccggctgatttttgtatttttagtagagatggggtttcacagtgttggccaggctggtcttgaactcctgacctcaagtgatccacctgcctcggcctcctgctgggattacagacatgagccaccatgcctggcaagtttttgtactcaaacttgtcaaccttttcctgtaagctttagcttgtttaggaaggcattccttaccccaagattgtaaaaatactcaatatattcttctaaaacttgtataaccatattttttatgtttagctattaggtccattgaatttgtttttaaaatggatggtgtgtagtagtggtctttattttattggtttgtgagtagatagtcagttgtctcaacagtttctaagttcctaaagttatctctagctaagagacttggaggtagtctaaagcaggcctggatagtcatttcacaaattaaaactcttattttgtccttttccycttgaacctgtttagtgtacattttatttatttacttatttttcttgaaacatggtctcactctcttaccctggatggaatgcagtggcacagtttcagcttactgcaaccttcgcctcccgggctcaagccaccctcccacctcagcctcccgaatagatgggactacaggcacaagccaccgtgcccagctaattttgtttttttattttttgtagagaccaggtgtcgctatgttgcccaggctggtcttgaaatcctgggctcaagtgatcctcctgcctcggcttcccaaagtgctgggattacaggcctgagccaccacacctgatctaatttaatctaagccagaacaagactgcatatgttgaatgcatctttttcctcagtcttttcttacctgattggtaaagtatgtttttcaaagtatgttcctcagagccttaaaggttcttagggaggagggagcaccatcccctttaatgcttcaactacagcagcttcactgaggtctcttctatacattggacttccatgtaaggttcatttaaacaaaggtctcatactgaaaatggttaaaaacatatcatccttcttacctcaggttcttcagaagagtgtgatcattggagtgattgaaggtggagatgtgatggaagagaggctgaggtcagcacgagagacagccaagcggcctgtgggtggcttccttctggatggttttcaaggaaatccaacaaccctggaggctagactacgcttgctgtcatcagtcactgcagagctgccggaggacaagccaaggccagtgttcggttaggacacaggctggcctcaagggatgcaggraaggagtgctggccgattgtatattaaatagtgtctgtgcataggcatgcctttgatgttttgtttatgtcctttctgggctgagtctgctgaggtgctgaggcagactgtaaggggagtttccatcaaggctgtcctggccttgatttcagaatgtagagtagaggataattgccatttgaattatgttatttgatcctcctaagtgagagcaagtattatactgtttcccctcattcttgtgccaattacaaatattgttgttataatatggtacctggagaccaagtgtaaagtcacatggaatgctggtttaaattgaggaaagttgaggacagatctgggatgactagtgagaagatgagctccaccaacaagaacttaagaagctcttagatttgaggctggtagtgagtggtgtcaatttttgaaattgaggggactgacaacactagtaggattggttcttatgtttccataaattgcaggattcaccttgtgctgataagaaaagacgatctgcaagatttgaagctacaaattctgagtttctgaatgcagctgatatcgtattaggctacccacattttttttaatggtttgttatcttaatgtgaatattcatgcttttttcctgcatgtatattaagaagtttggttgtggggtgctgctccatagtctctagagctgttggatagtatataatatgtgtaattttactactttttttttttttttttttgagacggagttttgctcttgttgcccaggctggagttcaatggcatgatcttggctcactgcaacctccacctcccgggttcaagtgattctcctgcctcagcctcctgagtagctgggattacaggcatgcgccaccatgcctggctagttttgtatttttagtggagacggggtttctccttgttggtcaggctggtctcgaactcccaacctcaggtgatccgcctgccttggccccccaaagtgctgggattacaggcgcgattttactacttttttaaagatccaagtacaacttggaggaaagcacgtgaatcttacatacagctcaattaattttcacatgtctacacttgtgtaaacactacccagaacaaggtatttccatcaccttagccagcctttgatccccaattttaacctagttcttttgtgttcattgctccctctcctgtacttgtttcactctggtgcacataacacttcagcaccagtatttctagacattttctggacttcttcatgttaagtgctcacagatgtctgttactgaatttgaaagctggattgtttttctttctataagtgtgtagaaatgccagcttcagttggataggagttctaaaacattacatcacttgaaggaaactgtagtcaggaaaaccagcatatatttgtaagagttctgcttatttaatattacatgagccttttttttttttttgcatttctgtgccagttcatagaaaggggctataggtagtaaaacaaacataaaaaagagcagcagccagccagccctgatttagtacatctccacatctgttttcatggagtggcaaaacctggccgagtgccattaatagtctcaraatgccttacctattacaagttgagtatcctttatccaaaatgctagggaccagaagtgcttgagattttggattttttcagatcctggaatatttgcagagtacgtactggttgggcatccctaatttgaaagtccaaaatccaaaattctccagtgagcatttcctttcagtgtcatgttggtgctcaaaaagtttcagattttggagcattttggatttcagattttcggattaaggatgctcaacctgtaccttggaaaccaccatcttattccacagtgcagactttttattaatggagaaaatataaagaaagccaactagattcttagatcctatggccagaggtgaaatcctgacagcgagagttgctttgtaaattaacttatgagggatatagtggattaaaatgtctttattgcaccaattatgaaaaattataggcaaaatacagttaaaacaagcaaaatatttcagcaagaaataaagcacacagctttgcactcctaaaaaatctatatagtgtatagaagataggctataaagggctataaagtttagtttatgaccagggaggttgttcagaaggatgatagttgagaggaagctaacctttattgaacttctctctgggatcagaaactatactatgggctgggcgtggtggctcacacctgtaatcccagcactttgggaggccaaggtgggcggatcacctgaggtcaggagttcaagaccagcctggccaacatggtgaaaccccatctctactaaaaatataaaaattggctgggcgtggtggcgggcgcctataatcccagctgctagggaggctgaggcaggagaattactcccggaaggtgcaggttgcagtgagtcgagtttgcgccattgcactccagcctgggcaacaagagtaagactccctctcaaaaaaaaaaaagaaactatgtgctttttcaaatatctcattaatcctcacaacaattctgtgggggtatatattatttgctcttgtttttaagattagataactaaaactcagagaagttaagtaatctttccaaagtgacacagcagatacataaatgacagagctaggattcaagccccagtttttctggctccaaagccatatgttctttctgctgcatgttgctgtccactgcctgccactctaaccatgattggtgtttttcattattactatttttttagtgccttgttcattaaaaggactttctgatttccttccttgcattgtcctcatgtcactgttcttattcttacttttacaggctcatatctggtgttagtcggccagatgaggtgctcgagtgtattgaaagaggagtggacttatttgagagttttttcccttatcaagtaacagagcggggatgtgccctgactttcagttttgattaccagccgaatcctgaagagacacgtaagtcttttgaagtttatctcttatccttaagtttcttccatttcctgttaatttttggcttgagtcacaagacagaaatatgtatatataaagccagtcttttacaaaactacatctctgtttcttatctgtgtgctctggcatgttggcacacaaatccaggtacttaatactatacatgtagctcatcaatattaggatgtgattttatagtgaaaagaaccaagaaaaacaaaacctcctctgttaacagcctgaaaaaagaacattcagagtgaattgtgatgaaaatcataagaaaacctttgaactgcttggtaaaagttaacttgttttctcacaaaagagtttttgtctttgctttgcaaaccctatgctattaaaatacagggagactcatgatcctctgatcctagtgttacttcttgcattttttttttaatacaccaggctttgaaagctattttcctttgctaatgttgctttgaaggactgccattttcttttattatttagttatccagaagttaagaaagtcagtttcggattctaacacttacctggaggtagaaaaggagctaggatacagactttgggctggagttgcttgaagtaggttttcaggagagtgtcgcctgcccagtcttccctctggccttcagaaatgacctttcctttccttttcctgctgtccttggaacttttccttaaccacatcaaccttacatttgaataggaccagaaacttccttaaaggttcattttattcctcacaggtaactaaaatttcattcagatgttatacttttatgaagcaacttaaccattaatctaaatggaattactcctggaaacaaaataaatcaagttgatcaaattcttaaatatataggaggtcaattttactgtccttttagacagaccagaatataatgtatgtggataggtataccattaacactataaattttcacatcttcatttacaaactgaattatttccaccagaacagaggtaactgttagtcattcagtaccaggaatatgcaaagctctaaaaagaacctgatttgagttctctgtaaagaacaagatcatttttggccagagaaagccaaatttcttcatgattaggaaaaaggaaatagtttgaatgtttaaacaaagtattattaactctgtgtgtgtagtaaattaaagtcctttgccagttacatagtgaaaattccaaagaaattacttggcagcagttctcccaaatgacaagagttttctgaagtgtcagggcttaaaaaaaattctttttcagaaatagggtctcactctgttgcccaggctggagtgtagtggtgtgattatggctcactgcagccttgaactcctgaaaaaagaacattcagagtgagttgtgatgaaaattataagaaaacctttgaactgcttggtaaagtttaatttgtttaactttaatgggcacaagccatcctcccacctcagcctcccgagtagctgggactacaggtgcatgccaccatgctgggctaatttttaaattttttgcaaagacaggatcttgctgtgttgcccaggctggttgtgcactcctgacctcaggcgatcctcctgccttagcctcccaaagtgctgggattacaggcatgagccactgcggccagctgagagcttcattatggtttcccacatcagcatgcaaatttatgggaacaaaattataacagctctgtgcccagtgctcaggttgcttctcttatacctttgaccttgataaaattaccctcttaagaccacctgtctttctcctgggaccaacactgagatttgttatcatttgttcccaaaataccccttaactacttgtccctgttccaggcagttggctttttgtagagtagctggtgtttcttttgctgtgcaaagaatgtttcttcttaaagcagagagttgaagggaacaattcaggttgccatttaattctgtgtagtctgggttccctagagggccagtgtctccatatagaatacatacattaaaaccatgttctacttcaatctatttggaatataggtagttcaaagccaagtatatttgcatgtacattatgataagggatagtgataaccccaccacacacacacacacacacacacacacacacacacacacacacacacacgcaaccaacagttaacttttgttggtttatttattttgcccaggctggtggtgtactcctgacctcaggcaattctcctgccttagcttcccaaagttttgggattataggcatgagccatcatgcctggccaccaatgtttttaaattatttcttgatgatacgattatatgttatatacttgtaactataatttgcttagatattattgaatctctaaattgttttggtgttgtagataagaggacggtgacagtcttggagcatattgctgttttccttttcttgtgtgatttccttaggataaattctcaggagtgaaattacagagtcaaagatcatgaaataataactaaaataaaatgtttccaatggccacttcttatctgatcatcattcaagcctttttattggtttgtccttcagtactacaacaaaatggaacacaagaagaaataaaatgtatggatcaaataaagaaaattgaaacaactggttgcaaccaagaaataacatcatttgaaattaatctgaaggaaaaaaagtaagaaatttttaaaagtttggattttgctttctgacttctgaatttyagtctgtgttaaaagtttatgggacaattctcaatttatgatttcataaaatattaatagttgggtattatttaggccttctcaaattcgatttcaaaaaaactctttattttcttcagatgaatttgtagacttygtcttgtcagaagactggagccaggtaatgattgctttagaaaagctgacagaaagattaaaccaaatccattgtttggcgtcttgtattcctttagagcataataaggagttcaagataaaacaacaaagttttaaaytgtagggtgcctaagccatctttgttagatacaggctgtaaatcttacgtaagatatttatctctataaagaacaaattaagatacagattgaattgaatatcccttcttcagaatgcttggaaccagaagtgtttcagatttcttttctttgttgttgttgttgttgctgttgttgttgttgctgttgctgctgctgttgttgttgttgttgttgttgttgttgtgttttagaacatttgcattatacttacctggctgaacatccctcatctgaaatctgaaatcctccaatgagcagttcctttgagcatcatgttagtgctcaaaaagttctgaattttggagcatttcacattttagattttcagattaggaatacggaacctatatcttgtaatttttgtatttgtccaaaagtggtaatcatcagtgaaccagtgagtgatttttctttgagtctgatgcactcactttagtgctggggtgggttttttgtcttacgtaaaagaagatcctatggcttgtgacttacttatgtctatctagtgatagtacagacttgagagtttatgaaagaatgtgaaaatccttgttcttacccatattctgttgggactcctttaattgtaggtcagaaatggtgatgtctaccgcatttgacttcttaaaaaatagccaaggagatagatttgtttttgtctttcttttacccttttttttctgtcatccactgactctcaaatgatttatttatgtttttaaaattttagggtaatataaatggttactactaaaattccctttatgttatagatttaattggaaattgtactattattatcagcactagacttaagtttttgagatttgtagacaaattctagcactgctcttgactgtgtgactttggtctggtcaattcttcacttttttcttttttttttttttttgkggggggcagagtgtagctctgttgcccaggccagagtgcagtggcacgatcttggctcactgcaacctccgcctcctgggttcaggcgattctcctgcctcagcctcccaagtagctgggattacaggcatgcaccaccatgcctggctaatttttgtatttttagtagagacggggtttcaccatgttggccaggcagggcttgaactcctgacctcaatccacttatttttaatagttgattaaaggtaacacctggccaggcatggtagctcacatctgtaatcctagcactttgggaggctgaggatggaggatcacttgagcccaggagttcaagaccagcctgaacaacatagcaagatcctgtctctaaaacagattatctgggcgtggtgggaagctgaggtgggaggttgcttgagcccaggagtccgaggctgcagtgtgctatgattgtgccactgcactgcactccagcctgggtgatagaacaagaccctgttcccccctcaaaaaaagttaacacctatgcagtgcttaggcctagtgtgtgcccagcagtgttcaagtcctttaactgtactaatacatttcatctttgtaacaactgtctgagataggcactgttattacctttggttcatggatgagaaacaagtcacagagagatgttaagtgacttgcccaagtaagttgtgaagccaggaatcaaattcatgcagggtagctccaggaccctccctctcaacccccatagttatcttcatctgtagaatgacaataaaaatagttatctccaagaatgaatgtgaaggttaaatgagacagtgtatgtgaaagtatttggtaaactgcaaaaagctgtgtaagtagaagtctaccatgtcttttgataataattctggtggtaagtgggaaggaagtgtcactcacttctctcctaagtgtccaacacttagaagtgtttcctaacattatgtgcttttacaatgtgattagtaatactcaacatgagtgagcgaccacatgaatttcttctgatgctcctttgtaaccccagactcggagtttgcatcagtcagagaaaaactccagggtctccctgactcattgtgttctttgttaacttttttttttcttttttgagatggagtctcgctctgttgcccaggctggagtgcagtggtgcgatcttggctcaccacaacctctgccccctgggttcaagcgattctcctgcctcagcctcccgagtagctgggactacaggcacgcgccaccatgcctggctaatttttgtatttttagtacagacggggtttcgccatattggccaggctggtcttgaactcctgacctcgtgatccgcctgccccggcctcccaaaatgctgggattacaggcatgagccaccacacccggccctttgttaacttttaaccatattgccattttaagcaggtgcacagcactgaacatttgccagtgatgttattaaccactggtaactttaccagcagaatagatagctgaggttgtggatttcttgtattccgtactttctggaatgtcactgtgacttctttcttaggtaccaggaggactttaacccgctggtgagaggatgttcctgttactgctgtaagaatcacactygggcatacatccaccatctgctggtgaccaatgagctgctggccggagtcctgcttatgatgcacaactttgaacactactttgggtttttccattacatccgggaagcactaaaaagtgacaractggcacagttgaaagagctcatccacaggcaagcatcttgagatcttgcaaatacaagtctcactcttcacactgagcctgtaccactgttgtaacatgggaagacgtgaagaagaaataatctgagctttaattatttatatttggayataaggtctgcttaaataaagaatctttgtaccaaactgcccacatgagggtgaagagatttcctcaaaagacttaaatgacctggattgatcagagagaattgaactgtgacctttaaracttctagactaattcttttagttgatagagattcatttagtcaaagacaaaagctttaactgtgagggcacagccttgaagtgggagtgatgagattctgagggacccatgaattggattgaggcttgaggggaaatggtgtgagacgaatgggctctggacatatgcctgttgatttgagaagaaatctggctggtttgagggtttcctttagttcaccctcatactctcaggagactcttctggatacttttgtcttccaccctgccctggcagtgcagccaatcagaaatggctcttgtgacttaactgggcttggatatccctggaatgtggggcttgaacattgctcctgtgatgatcatctgtcccaggtcacactccttcatttgaccacatggcctatttgcaacttctttttagagccaatgtaattgcctgttaggagccagaagtttgcccagctgctttcttctggttgtacagatccattgtggtctgccttccaggctcattaatagtctaactacgtaataactgaagacctatctcttgtgaagattcattctcaatgtgttcacttggacagagccctgcctggcctaacgattagagggttagtctccatcctgctcagatatgactcctgggcaattcacttaacttctccatggctgcttcctgctgaataaatagggacaggcataatggataggaatgaatgaacttttaagatactgtctagctctaaaattggaagaacaaaaagttttagattagagtcatagccttaatagccctagttgtcatcctgggagacaggcaacagtagagatatttgagagcctaaagagaggtttggcctgtgggtttttaagtggttattgaattggtatcaggagatcctgaggctggtaggggaaggtaattctttctaagttacctctgtatttttcaagttttctataaggaatacacatacacccacatgcacacaccatagtttttatacaaacagcaataacaaaaccaaaaagatgcccctttttttgtagggataagaaatacatttgttttatacttctatgctatattttgctattcaaaatttagtgggcattacttaacattgtttctaattattttgtggctgctgtatgttttatgtgttgggagcccattgtattaggccgttcttggattgctataaagaaatacctgagactgggtaatttggttttttggttttttggggttttttttgagacggagccttgctctgtcgcccaggctggagtgcagtggcgcgatctcggctctatgcaacctccacctcctgggttcatgccattctcctgcctcagcctcccgagtagctgggactacaggcgcccgccaccatgcctggctaattttttatatttttagtagagatggggtttcaccgtatgagccaggatggtctcgatctcctgacctcatgatccacaagactgggtaatctgtaaagaaaagaggtttaattggctcatggctctgcaggctttacaggaagcatggtactggcatctgcttggtttctggggaggcctccggaagcttatagtcatgrcagaaggtgaagggggagcaggcacatcacatgacaaaagcaggaacaagactcagagcaagaagtcacttatcaccaaggggatggcccaggccattcatgagggatccacctttgtgctccaaacacctcccaccaggccccacctccagtattggggattacatttcaacttgaggtttgggcgggaacaaatagtcaaattatattacccatctacatggttttctttttcttagtatgggagtgtccatgaataaattcatgggcatcctcataactcttccatgaatggcaaggggtacttatggaaaacagttttccaaagatctgattgttttgaaatgtgttagattggacttgttcaaatgttcatatttttgttctatgctaaatgcatcgttaggggagtagtggtaaatattccagaatccatatgaaattcatgagtttatttatgtctaaaacactgaaaactgtgtccaatatcgttcagtttcctgggtctttttcttattagcacatttgagaaaaatattcctttcctttattgtagtaaatctattaaaggcaatagccaataaaacatttttaattttaaaaatttactgtgtttggctttctgtaaatgtagtaggtctgttaaacaaaatattaaatttccatagtaccagaaatgttgtagagatttctcattggaagaaaaaatgtttatctgtattcattgttttgagagcttccatgataaatgtaaaatccaaaaagatatttaattatatacattatgaagattcccttatctatctttattaatctgttcttgtgtttctataaagaaataccagaggctgggtaatttataagggaaagaggtttagttggcttacagttctacaggctgtataggaagcatggcaccagcatctgctcctggtgagggcttcaggaagcttacaattgtggtggcaggcaaaggggaagctggtgtatcacatggtgagagaatgaggaggtcccagactcaaacaaccagatctcatgtgaactgagggagaatgcactcatcaccaaggagatagtgttaagccattcatgaggggtgtacccagatacctcccaccaggccccaccttcaacactggggattacatttcaccatgagatttggaggggacaaacatccaagccatatcacttacctctttaagttatgtaattatgagccttaaggccatgctagcacataataaaaataataatcacaatatggagtattttaaatgtgccaggcatcttggtaaatgcttttcatatataactattgactgttagagcatggctgtgaggtgttgctattgtcctatgggctatatgtgctagtgctagttattccctacaggaaaagctgaagccagctatttaagaactgaattttaagagggttgagtagcctgcctgagtgcctaccagatatttcaggaaagaaatagtttgcctaagggcctaccactactcagctcccaggtagactctagctccacagttatccactgtactaaataaattcttaattttgacttgcttctggtttgagggggctaagagaatcagggactgcagagaggggcctcctggccttggggtattgggtgctttaggaactttgctgcaacttggccttggcttcagcttttccagtagggaatagctagcactagcacacgtcccgtggtaccatgctggtatttgtaggtgctcaacatgggttgccattccacatcctcaaatttctccccccttcccagtttgggactgtaaccacaccctgaatggtgttgaaatgtttgggtactgtgattagttcaagtggattcaggtaatcaactggagtctgaggtttcttatatcttttgggggaggtttattttgttactccttggaataaagggaaaatattctaaaacattttttaagcaaatacttgagtaatgacagcattttaataaaaatttcaaacaaagaccatcaaagggtcaaggctagaatggaaagcaactatcttatccagggtgttttttctgtagaggcagcttggagctcagtaagaaaccacagagttaaatgattaccctgtgccttcctgattaggaacaggctgctctctgcagtttgattagtcttgcttgtaactatgggattatagcttattaaaactgacagtgctgtgtagggcagggagcctggaaggtcaaacttccatgctgagccagccaccagcaaggctctgcctttacctaaaagtttggtataattggcattcatttaaatatcctttttaatctcttcactttcttttcaacctttgtgtctcttagtaatttacaccttttctttccttgcttcttcacgaggttccctgatttgtgagcacaaaacccaaataacagtgggcaaagaatgaaacaagccagtgtaagcaatgtgaattagcataatcgtgcactcttcctcccgaaaatcctgcttcatgcccctagttcaggtataaatacacagcatcctgcccccgcctccaccaccttttattctcaaaagtgctggccaagttaaatggtcaccctaatgtgaggggtagagatgatcaaactagagaacaggtgttccagctaaatgggacagctgatacccacctccagctaattgctgctgtggctccggtgctgccagatatttcagtctttcaggagaagccaaaaatctggattttcaggtgaaatttcacaatttttaaatgctgggtcaatttttaaacaatattctgctagccaaacaaaacatgggggtgcctagtttgcaacctctagcttaaaatctggaagaagggctttggtatctttagcatttaaaaatttctcaacaactgattgcaatatacagaaaacatacctgtagtttctagttcctgcagctgtttagattcccacattaagagagcccatgttgtcccatctcctttgcagggtcaccagataactcccagaaccattctaaatctgccagaagggaaggtatgcagcatcttattcaacctattttatgcaggaggaattttaagcctggagaagaaagattaacagttggcgccccgtgcgctggctcatgcctataatcccagcactttgggaggccaaggtgggtggatcacctgaggtcaggagtttgagaccagcctggccaatgtggcaaaatcctgtctctactaaaaatacaaaaattagccgggtgtgatggcacgtgcttgtagtcccagctactcgggaggctgaggttggaaaatcacttgaacccaagaggtggaggttgcagtgagccaacatcgtgccactgcactctggcctgggcaacagagtgagactctgtctcaaaaataacaacaaaaaagagagcccatgttgtcccatctccattgcaggatccccagataactcctagaaccattctaactctgccgaaagggaaggtattcaggatcttatttaacctattttatggatgagaaattttaagcctagagaagaaagactagcagttggctgtgtctttcctcttgggagtgtcttagttcaagctgctataacaaaataccatagactgggtggcttaaaacagaagaaatttatttttcacagttctggaggctggaagtctgagatgagggagccagcatggttgaattctagtaggggccctctccctggtcgcagactgctcttgtctttccatgtctccacatggtggaaagaagggtagagagcaccctggagtctcttttataagggcactaatcccactcatgaggactccaccctcatgatctaaattaccttccaaaggccccacctctgaataccatcacattggggttgggatttaaacataaactttttttttttttgagatggagtctcactctgttaccctggctggagtgcagtggcgcgatctcagttcactgcaaactctgcctcctgggttcaagcgattctcctggctcagcctcctgaatagctgggattacaggtgcccgccacctcgtccagctaatttttgtattcttaatagagacggggtttcaccatgttggtcaggctggtctcaaactcctgacctcgtgatccacccgccttgaggcctctcaaagtgctgggattacaggcttgagccaccacgcccagccttcaacgtaaacattttgtggggacacaaacattcagtccataacaaggaatttaaacatgcacacagttctttctagttagcattttggcactcctaaatctcaccacctattttctgccgggcctgtgcccttctagggtcagcatcgatttcccagtattcactttccagtggttcmttctggcctcacaggaccagctggtacaggacataagataagagctcctattgcaccttccagcattaatagcaatagtcctggatgacaccgtgaaatctcaattactgtttgtcaagtgaacgaatattctgagtagttgaggcattctcttccttattttggccaactgagtgctggttagaagtgacttgcacaacactatgtggtaggacctatgagaatgtcagtggtggttttatgtcactttatgctaggcaagctcccggtgacctgacacatttttggtttttcggattttttttttctgttacttggtaccattatcatctttcagtgctggcctcaaagcaatttcccctgctctgacaagaggaactcagagtgaactttccttttgttctcattcctcacaatctactttgagatcaggtcggagttgccaaggagttcaaacggccgatgcttcccagtgtgattcagagggatccgtgcctcctttccgcacactattcctaatgctcacctctctccctgaactgctctcgcctgctgtcggctcctttgtctgcgaaacacattttctcttattatcaccttgttctctgcctgccttggatggtttcagcttgtctcttaacatcaagatgttgctattaacagtcttctctttcttaacagcttacagtcacttccttttattcagtccttttccttttccctcccaaaccacgtaatcatctctttcagcctcaaataaaagttgtataaccatttcataaccactgctttagagttgctatcaaaaaggcacaagaagaaggacataaaagtaaggggagagaaatcaaaaggagaggaggtgagggatactccaataattgagaaacagggtgtgtgtgcatcttcagaattctcctttgttgattagccctcgagactgaccatagcaagctcagtggtctggtgaaattttcctctaatttttatggacagatgggaagctgttctcccctccgaggctctgttttccttccaaatagttaaaatattttctttgaactctcccagaatcatttatttttgtcataaatccattcacagaatccaattacataacggatatgagttttccacacccccaaaaagctaaaatatttactcacattttccagcattttccattttctactcatttattttttagttcaacaaaacttaaataacatttccatcacaattctatttattgttcccccacaatgctagctgaaaataccaactggaaatgtactccattcccacatagtaactgcacttcaaaagacaagagagtgacaaagtatgtccaattttttcttttttacacttgaactgattttggttagactctccagttttacattgttttttgtagaaagttcagtcatgttgaaaaagtcagttccactttatattttttccacctaaacattcacctgttgccacaaatccaacgtgtctaaaaccaaatttactatcttccttcagtcagactagttctgcacttcaacttccttgcacctggcttccagccaaatcagctggaaaccttactccttggatgaatgaagtaatacatagaagggatgggtataaggcatttcaaggaggatcagcaagacttggtgactgactcagaggaggcagttaaagcctgactcaaggaagattaccacccatcctgcccctcacctcctccttgtcctcctcaactccactctcttcctgctgtaccaaggctaaactggcagcctgaatttctagggccgccataatctgaacctaaccaattgccgtggacttttccacttttcctaagtggttatatcctaatcctacccattctcaaggtccagcccaagaaccaaaccttccataaaaacttgcttttctagaattctagagtctcaagattggaagaggagaggcttctattctgatttcctttgttcataaaggcaccagcaaccagtgctctaggcatctgatttaatcagtgcttcagttctgtgagcctcatcttccaaccagactatcagctctgtaagggaaagataatccctcagcatttgccgtgtctgcaccctcacccctgccccactgaaattaagggagaatgtgtgattaattttcttctca

SEQ ID NO: 94243 - DNA, 76872 bp, Homo sapiens
  misc_feature (1)...(76872): n = A,T,C or G
aaaaattggattcatccccgaagagtgagtgaaagagatcattgactcagctaggaggaatgatgcctgtggtcctgaagaaagttttcagtaatctacattctacatatccctgaagaaaacatcatggtgtttgagaaccagaactgaaacaatgggaactggaaatgactgcaattccatttcagttgacagcttratactcattcacaaaaggctaattaaggcttcacaggattcacattaaatttattatggctataaatgttttcctggaatgtcacattgtagaataataggtattaatttttcttatttcttgaacagaaaggcactatgtccccgttttgacacatattagctctagatccttgaacaaattatgaaacttctctgagtcttcaattcttcatctggaaaatggggataatgatagccctcagggttgatgtgtgtaataaacaatataatctatagaaaatctcctagcatctagagggatatagcaaatatgaactcacatgtgaggttttttttttttttttttctattctcttggtgtcactccgtttacttccaggtgtaatgatcaaaagctgagagagggcccccagtgtgcatgtgtggcaatttcttgtgtattccccagcacgaaatttgtatcctattagtgtctcagcttgacaagccactctaagtatccttatgatgatgagagaatcataagtttgggggtagatgagttcttttaattctgaggatgagaataaatagccaaagtactgtaactatcaagatcctaatgataattgcgcacacacccctttacaatatcagctgttgtcacttctcagaaaaataattgatctcccttccccaacaagtaaaagtcaatttgatgtctctaagcaattgcatgtaaaactttctaagtgttaaatgttttgaaaaaaattttttcagctacaaagtcaataggtgcttattgtgaaaatcaagcatttggaaatatttttacaaacattcacatgaagttgctttaagtccagctctgtaaaccccccaaaacgagacaaaggtgtaagctaaaaaggttaagcataactaatgaattaagtgtatacctaaagtaaagctatttgtaatactttgacagaattattagttttgagactctgaagcagaaatgaggagaaaagctccacagacatatggggtgagatacctccctcctctcctgaaaggggggcccatcaactcgtacagtagttcaggcttctagtccttcccataatcaaataagagctctgaggaagctgccttgccccaagttgccattattttgtagattgcccccacacaactccaggaagagctcccaccatctctgagtctgtattggcaaccgctcagcaattggaagttttcctcccgtgttgaccaaggtagctaggagtcaactaagagagctcttttccaccccctacattgctacattgcttgttgacttgaggccaaaatgtcttctaaggagaaaagttaaggaactttaattagggtcttgaaattcaaaccctaaacaaccttgtaaatttgataccaatcaccaaattgctctctaaaaaggaagtagcactttacaattccataaacagttttctgacaccttttaacaaaattgtatcgcattcattttttttagtttcagccaatcttatttctcattatttttttaaagtagtattattataaaaggacacaaatttttgcacatggttgtaaactatttgttctttcttttcttttctttttgtttttgaggcagaatctcactttgtcgcccaggctggagtgcagtggcacgatctcggctcactgcaacccctgcctcccaggttcaagcaattctcttgcctcagcctccctagtacctgggattacaggtgcccgccatcatgcctggctaattttcgtatttttagtagagacggggtttcgccatgttggccaggctggtctggaactcctgacctcaggggatctgcccgccttagcctcccaaagtgctgggattacaggcgtgagccactgcacctggcccttgtatttattgtacgaattgcttgtttatggcttgtgttctattttaaaatagggtttttttttggtactgatccataggcattttttttaacatattctggatattctccctttaaaaaaaatacattgcaattattttctgtcagttgccctatttacggtttccactgtacagatgttctacatgttcaggagtttgggatgaacttatccccagtcacaccatcccacctcccctcaccttccagcctgtggtaaaagagactgagcaatgaagacccctgaaactttgacaaaactggtagaatatgaggatgtcatcatttatgaagctgcaaataagcttcctggtagacttgacttccttttctgtacaatcacaatactggaaaaatcatcacaatggatatttacatatgcaaaaatgtagctgagactctagtctgaaatagagattttggagaagtatgactctgcttaatgcaactaaactgctttttgctaatgtgatacattttctacactgtggacagtcatagctgtaagtcaggatttatactgcttaggcactgtgggtttttttttttttttttttttttttttttttttttgagatggaatctcgcttgtagcccaggctggagtgcagtgacaggatctcggctcactgcagcctctgcctcccaggctcaagcaattcttcttcctcagcctcctgagtagctgggattacaggcgtgcgccaccacacccagctaatttttgtatttttagtagagccggggtttcatcgtgttggttaggctggtctctaactcctgacctcatgatccaaccacctcggcctcccaaagtgctgggattacaggcgtgagccaccgcgcccgacctactgtggcttattatttttgagatgcacatgttctttaaataattgcttataggagataaaactccaagacagccagaagactgcactggcaggattttctccttgagttggaggaaggattgtatgtaaaaacgattagcttggtcaagctcagtcatgagctagatggtgtttaaaattgaactcaatgttctctgaccaatgtgtcaaattaaaaaaaaaaaaaattgaactcgaccttgaaaactgtttttaaaaagaaaccttttgaacatcatgtactgtaaaagaaaaaaaaatttaaagttttaaaaattattctaagaggatgttgtaagaaagtggcctcatgtcactttataggtatctccagtcctggggttcacttactatgatctgatctgattgtcttgctgagagcacacccttatgagtaggtctctcctacaaggagtagacattcttgccatcagtcatggcagaaaaggctgtacttggcacagaacaggagaatttagaaggcaggccctacaatggggatgaggaggaaatactttggtctattctagactgcacatttagtgctgaatggcctcccatggtaatgtggggaacctggcctctacctgtcactggtgcgcagaggcgacagtctatgaaacaatagcatttattttaaagagactgcaccaccataataaaaaaaacaaacctagtaaaacagggccagccctatatgtacactgcctgaaaattataattttaggggcctttgaaagaccttgcatgtcccaagagtcctctccttctttgtggcttttcccctcccagcttattagaagaaatcttctaccaaaaggccaaattaaatatacatatattgggagggtattttctccaaaacaatgaccaaaaacactaacccagagaggactaaaaacttttaattccatcaccctacttaagcctttgtcagtttccacaggaatataaaatatttatataatagcaatcatgtgcccatacaataatatatcttgaatttttaaaaattaatgttacactgatcaaaagcccctcccatcacagagagttacatagcagtgatatctcagaaagaacaatgattttggcctcaggtgctttcctttgagtcacagctccaatgtaggcagcacagccctagaccacctgactctgttccttcctttctaccatgactggcttgcagggtgagtgagaggaacagatacaatgcatggtgggtggctgactcatggtgggcaatgactggtagttaatatttttagcgttatttttaaagtcaacattttacttcctgaattgatggttttgggggcaagcactgtgccaagccttctttacaacagagactgttttaatcctaatcacccttcaagactagctgtattatctcactttacacctgacaaaaaatgaagcccactgtggtaatgccacttgcccaaagtcacacagcaggtcagcagaagaggtagcttttgaactaggttggggtcaacagtagtcactactggccactaccaaatatgaaatacaaacgtcacctcagaacagcagatagcctctctccttagcacactgctttgcagattcaagaagtccagaaggccagagtggatgaggtgaaatacagttttagtttttaagatcatgaacaaggggtcagtgaagaacccaggagaaattaaaagagcaaagtaaacctcaacaccaattagttcagatagacaaattccctaaaactctttcactatcctgatgtctcaagagccacgtttaaaattacaaaatctgtgtgggttatgtcaaaggcaatctgtagaaagggcaaagaatatgaattatctgaacccattgagttttttgtttgtttgtttgtttgtttgttttgagacagaggctcgctgtgtcgcccaagctggagtgcagtggcgccatctcagctcactgggttcaagcgattcttctgccccagcttcctgagtagctgagattacaggcgcgcaccaccatgcccggctaatttttgtatttttaggagagacggggcttcaccacgttggtcaggctgatctggaactccggacctcgtgatccgcccgcctcggccttcgaaagtgctgggattacaggtgtgagccacggcgcccggccattttttttttaaagtaaggttgggaaaacaacaaatgatacctcctagggctgttattacaattaagacaaataccagagcactttggcaggtggaggcgagcggatcatttgaggtcaggagttcgaaaccagcctggccaacataatgaaacctcatctctactaaaaatacaaaaattagctgggagtggtaatcccagcctgtaatcccagctactcgggaggctgaggcaggagagtcgcttgagcctgggaggcagaggttgcagtgagccaagatcatgcccctgtaccccagcctgggtgacaaagcaagattctgtctcaaaaaaaaaaaaaaaaaaaaggacaaataccagaaagcccatcacagatgaaggactttgttccagttcgtgacacattgccaactttgaattacatccaagtccgtgggtcttctctctggggtcaattgatggcacgtgattacactgctcagggcccaaaggttggagctatgacttgaatgtttctagacaaggaattatttgacaaacacactttaaaaagtattcagagccatccaagtaagaggacattaataacgtagggttttgcctatggagagaaaagaaaacgcaaacagcacgttccaccttcgttctccctaaagtaatttatctccttcaaaagataaaaagtacgaacacatttgcccttgaagggcagagccccggaattcaggagctctctgaacactcctccccttctgatagggaccaaaccttctgctgagccttgtgtcacagtcagtccgcggcgccacaagcctcagtgtttacttctgccgcctgccagccgggcggggaaggggagtacccggccacccctcactttagctcctgcagctttccaaacaaaccagggcgggatgggagtgtcttcttggctgtggaaatcgatcctcctaccttgtcctgaagccacccgccgcctttcctcgtccctcccttcgcggtgattttccggtcccggcgcccggcgagggcgcgcggctggtgtccgccccgcccgaaaggtaggggttcggctgtgctcccgcctggtccccaacgcctcaccctccgggagacccgcagcctcccaccactttgcaccttcctcctcgaatttgggggcggccaccgtgcaactggcgccagccgcggagcaggaggagcttcccgcgactccggaggcgctcggcgcagtcgcccgggattggggctggcgggagcctgagactccgggcagggctgctccctcctctgctcccccgccagatccgcggggaaggaatcgtgcccgcgccgcccctggcccgcgccaccttcctttggtttctgccggcctcgggcttctgcggcccgatgtggcaggcgccgcgagagaggcagcagccggctggagcagcggcccctcaggtctcggagcccggtgcgcctctgcggtcgtcgctcctgggcctcggcgggtcactcttgccggccggcttcgctgcgggtttgcactgcccgggtgagggaaattgggggtgcgggaagaccggtctgggccggggtccgggcggcctggggtctgtgctgccccgaccctccggctttgcagcctctgaggctcagggttgggggtggggacacggagcgctgtttgcccctccacatatcctgccagcaccaaggaggtggcgtgcggaggcgtaaagggaccatgggcgctgggacccgcgagccagccggcgtgcgccgcagccaccgccgagagggcacccggggatcctggagccccagtgaagggcgggagggacgcgcagcctcgcgggtaagcccaggagccgtgggggccgagakaatctgctctgggaccctcttttgtcgaatcgccggcgaggttgtgcaattgggaagccaagaggagtgtccagctcctcgttcactattgttttcttgtaaaagggtctgtacgcgaggagggttgaggggtctggaaggttctggtctcttaccgtataaagtttttcgagaaaccctttttccctccacaatggaactagacctaacaaaacaagctccgaggcagtttaggagaaaggaggacggtgagtaaattgcagtgtttgggctgctgttaattttcaagataagggagaagcaacttgtcattttgaggccgccggctccggagatcccggcaatctcaagcctctttcttgtgtgctgttattttggcttaaaagaaaacctataaaaagcgacgcccagaaaccaaaaacaaacccaaagcaccttcttttaggatttttcagtagcgagggtkggcggggacagtggggaggagcaggagggggagaagaggttgctgttgaaaggtaatgtttaaaaacagtgtgtgggggtagggatgaaaataacrtggtgactgctagtgtatcagaaatcacaccgagtctaaagtcgtaagtcccatttgccttacgaggaccagctgggtgctgtgagtaggtggatagttaaggaaactgtagatctgctgaaagctcctcgtggtctgtggtctcgtgtccacgctgacctttgaacctcgtaactcttcgggtctccagcggccacctcttttaggctagcccgaatgtttgactttccggtcctcaatcttcctcacctagctgcagamcataaaactgtctttttatttacagggagatgttaaatatttgggaacatctgctcaggctgccaggttattttccgtttgaaagcatgccgatttgacatttgcaagttggtttatgttgcttcctttttgtttcactaagaacgcttttcataccaagatctgcgaaaaacgatgcccttagactgttatttagtttattgtctctgagtaaggccaaattccacagagggtctttggataatggcaactttgcttataagaagataatttttctagaaagtgttgcattggtctggtttcctaagctgttcttgtggtcatgtagactgggaggggagatcttcattccttgtgatgtcgctttccttgaattgtatttttactatagttccacaatgtctcagtcccagattgcaccatatgttgtttacatggtgcagtaaaatgggactgcaattttgactacatttcagtagatttgttggagatagtttgttcttatgccctatatcaataataataataaaaaacctttgaggctcaagaatagacagtattgacagaataataccattaagagacataccatttaaaaacattagtctgtctcctgtgaaattgtaaatcgtaggtgttctcattcagtggcagacgactggatttcacagcagttttcttctgttggagacatttctgtgttccacatcatgtggaaccttatgggagaagacgtgagtaatgccatgtttcccgcatttccctgataagcatcatctgctaaccatgcagactgccagatggcttccatggaaattgtgcttccatccaggagtggtgaccagagatctgtttagtatgcattttaggtgatgcttattgagaaggtgaaggaagcatggaactcctatttggcacccactctgatttttggtgtgttytcatatgctattttatttaatcttcctgacaaaactcctgcaagaaaggaatttttagccccattttatagcttaaaaaaccaagattgccttaggttgagttgcagtggctcacataaaggtttgactctacctctgcctacaccatcccaggaatcctctgcagtatacattctgcacaaattcttccatttcctgtgcatatctttctcctttgcctggcatatcctccatttatatataccttggtctgaatatgcctttctagttatccccaggctgggctttttgaataggtggtctgcgtactttgccttccttgtgacagctttagactttcaccagccaggaaccttctatcttctgcacatctctgatgtgtcacttaggtgatcagggtctggcgaaatctaggagtttatgctgtcttcaatgggcatattccaaaagttctttcctttctgaatacattttcactgaagctcctactcaagctatatgttacctggaagaggttttcccagkgttacatccccaccctcacagttgaaatgaaacattctctcctgtctgtcccaactgtgatggataatagcacacatcacacatcacagtttccaatttaacccttaggggttaaaatggattttgatttggagtgagcttgatgcatggaatagaatgtatacattggatattatagtgttttggtaggaaattttatttacaattccatatcaggatgtcagaaacacaattccctcaccattgtgggatagctggagttctttcccctgatggtgacacctcagcactgaatcagctgcagtgtctcagacttggtcaggaacttgactgtcgtataatcaggctaagaagtgctgagattctggcagtgaggttatgaaagtaaaagataacaggatcagtaagacctggttttcttccttgtgcccatgtttgtttttcttggagagcttttggtcatctaggaggattgtccagtttacctttttactgccacaaacttttgtatctgaccaggggccttcctcttcctgcaccattgagatagagggaaaggaaagcacctagcccttaggagattttcttaaaaacattggaaagctgagtgaaaagttatcttctcccccattctctctttccccttcttatatgcttagcctaagacaaagtatacagatagcatcattgcatactttgcaatgtatttagtgctaggctttgaaagatggtttaaacattgatttactttttatttggttgggaatggaaagatctttaggacatgatgagaacaaggcccccagaagaggagacggcaaggaagctggagattcctccagaggtgggagggttattctcaccttccacaggttgtggaagcaggcctggagttgttatggctgtgggtcagagtcactatgctgaaagatgggggcaacaagggagcagaaagtgtttttttcagtggactttgggtgatattccatgtggtcatccatgagatgggacttccctaatggtcaaccaacattcactgartgtccaccatgtaacaagagatgttcttgtgggtggggttgggagcgtgccgtgttggacacagcaaagcccctgctcttacagagcttatgttttatggggggcagagtcaaaaaatgagttacaaatacatgaggcatgagtgaatttgggtcgtttgagaaacagaaggtgcagtgtgagaagagagtggttaagacaatatgtagttaaagaagagtgcaaaagacggagtgggaggagatgtagtcagtaagataggaaggcagattttgtggagtttgaatcgtattctagttagaattggcatgcctggagatttttgatgagagcctaattcagtcttcacccagtcatgataggctttcctgtctcttctttttctttctttttgaggtggagtcttgctctgtcacccaggctggagtgcagtggctcgatctccgctcactaaaacctctgcctcctgaatttaagtgattctcctgtctcagcctcccaagtagctgggattacaggcatgcaccaccacacctggctattttctgtattttttttgtagagatggggtttcgccatgttggccaagctggtcttgaactcctgaattcaggtgatccgcccacttcggcctcctaaagtgttgggattacaggcgtgagccaccacacgcggccccttcctgtctctctgtctctctttctctctctcacacacataaacacacaaatttctacccttagttgcctttttttctttctactaatttaccataactgatttcccctctcttttccctagggcagagcacaggaatatcacaaagacaggcagagctcagagacgcctatacagtattccttttatcctcttgtcctttgatttcaagatgtctcatcatcaccactctattagtatctagggagacttggcacaatttttagatagaaaattatttttgagattctttggcccattgttaactcacatacttaactaacatacaaaacaactaaattatggcttttctgattaacacagtggcataaaacctgaaacctcaggagacctatctcacattcaatgatatccaaaggctgaaagtaaagggatggagaaaagtctggcaagcaaatggaaaacagaaaaaagcaggggttgctattctaattttagacaaaacagactttaaaccaacaaaaaccacaaaagacaaagatagtgatatggtttggatctgtgcccccacccaaatctcatattcaattgtaatcctcagtgttggaggtggggcctgatgggaggtgattggatatggggggcagtttctaatcgtttaacaccatccccctgggtgctgttcttctgatactgagtgagttcttacaagatctggttgtttagcctccccccgccctccccccacccccgcctttcctcctactccaattatgtaagatgtgcctgcttccccttcaccttttgccaggagacttctgtgagtttcctgaggcctcccagtcatgctttccgtacagcctgaagaaccgtgagccaattaaacctctttgctttttatattacctagtctcaggtatttctttctttcttttttttttggatagggtctcactctgttgaacaagctgaaatgcagtggcacaatcattcttcactgcagcctcagcctcatgggcacaagcaatcttaccatctcagcctcctaggtagctgggactgcagatacacaccgccacacccggctgattttttaaaaaattatttgtagagacggggtctcactgagttgcccagtctagtcttgaacttctgggctcaagcaatcctcctgcctcggcctcccaaagtgtcgggattacaggcataagccactgtgcccaaactcaggtatttctttatagcagtgtgagaatgaactaatacagatgggcaatacataatgataaagggttcaattcaacaggaagacctaactatccaaaatatatatgcagccaacacaggagcacccagattcacaaggtaagacctatgaagagacttagatttccacacaataacagtgggagactttaacaccccactggcagtattagacagataatcaaggccaaaaactaacaaagatattcaggacctgaacttgacagaatgtacctaatagacatctacagaactctccaccacaaaatgacagaatatacattcttctcatctgcacatggcacatactctaaaaccaaccacacaaatggatataaaacaatcctcagcaaattcaaaaaaaccaaaatcataccaaccacactcttagaccacaatgcaataaaaatagaaatcaatactaagaaaataactcaaaaccatacaattatatgaaaattaaagaacttgctcctgaatgactttttggaaaacagtgaaattaaggcagaaatcagttctctgaaactaatcagaacaaagatacagtataccagatctctgggacacagctaaagcactgctaagagggaagtttatagtgccaaatgcctacatcaaaaattcaaaaagatcccaaattaacaacctaacatcacatctagagaaactagaggaacaagagctaaccaagcctaaagctagcagaagatgagaaataaccagtagtagacttgacttgaaggaaattgagacagaaaacaaacaaacaaaaaaaaamcccmaaaaaaacccatgcaaaatgccatataaacacagacctcttgtctttgagctgattctatgaaatcacctttcccataccattagattttagtcttaagaggtatcagcctgttgcttctgacctcttagtggggttttcagcttaggaaatattccattacaaatatttaggcaggaaacctagaaggaagtctcaaatgcttttattaaaatcttatgcaactttaatatgtaagagtccttaatgtattaaggggtggaggaagcagatatagggaatgtgtacattttctatggttagcatagggccaaagaataaaaggagattgtagattttatttttttaattctgtcttttttgtggataactcattgcatttaaaaactgtaagatgggttaagcagttgcatttagatgagagcagtgaggtgatagataatccaggcattcaaatagggtacaaatgaatttttcaactacattttagaacagcaattaaatgtaatttataatcttatttaattgataggttgtggtaattaaaggagctttctgttgtaagtgatcttgtgagataaaggacattgctgtcaaaatatttttaatatttaaagccaatatttcaggtagatgtcgaagtgatttagctaattattattcttttatcccagatatgctacaattaaatgataaataattggattttttgataaacgggatgtaaggagatatgtgtgttttctgatcaccaagtaactataaatattttgcacacactgaattttttggagggcaaatctggctctcttattgcaaaacacttttttttttttttttttttttacaaatttgatgtgtatggttcttctgctttagtcatagaataaaaaatcatattcttacaaaaatcttatattcaagctctctatgaccatcaatgattttcattattttttttctgcttaaaaatccagagaatttctctcactgatttttgaggttttctgccatcttatgttgctaactttctttttattgtcctgtttgacgctgtagccacgcaggtctcctagtgcttcagctcaggctgttctttgacactcagtgccattctccttctcctccacactctcccatctaagccagattataacgtgttcagtttccagcttcataacttatcactgcatgactccgaacaaatagcctaacttctctgagccttactttccttatctataaatttgaaataatatccacatsacagtaattgtgataatgaaaaaaacacatacaaatatttgagcatagtttctgccaaatatcaaatatttaatcagtgttatctgccactattactattataactctgtttttatagctattatgacaattctattcttcctcaattagttaaaaattgactttccccagaaaccctttctgattgttcttatatacctctaattttttctcagatctgtttcctcttagcacctggcttccctttggactatgttaatctacctatgttattatatttctttcatcattcttcagcgaacagcaacaaatactttgcatctatcatatgccaagtactctgctattataaagggatccatgggcatatagtagagggattcagtgtgtgtgtgtgtgtgtgtgtgtgtgtgtgtgtgcatgcatgtatgtacatatgctttcaagtggagttagggagagaaaatctgtaggttgaatagagctatgaatttttcagaataaactaggcttaaggagcaaaaaccgttctctccgaatgttcttgaaatctgagattttttttttttatggttcaaaacatagaaacactgtagttatctctgatcttgaaacagctttacatatgctttcttggactcctatgtcatcatccagatgcagggtagagatagaaagggaagtcctccttgaagaacagaatcctaacagattattccaatttatattggggagtgggaatgttgtgggaggggaattggggggcagggtgagaggagagggagaacattccgggcagcaggaacagtatgaccaaaggcgctgagacatgaaactgccaagaaggattgagaagtgcacaaagtttggtgttactagagtcaagcatttcaggagatgagtcaagagtcaagcatttcaggagataaggcaggacaggccgtaggagccagctggatcagacttagaggcctatggcttatatatttatatctctctataaggcacttagggaggtaggtctatataaacaatttataacaggtaaattctacatgttgcttctaaatttggacttggggcttacaatatggcatgtaatacattccttccaattgctgttgtcaccagaatatgatgaaaacattagttaagttaatatataattgatatttagcactctcacttttaataacttgagtgaaggatagaaatgtgaagtgtcatttgtgacttttgaggtgggggattctgtatgaagtttgatagtagagatgggatttgacgggattgagacatccaatgagaagagtcaagaggatcactacaaatgtgtggcctcgaacctttcagtaccttcttcatatattttacacagtagaaagccaagtgctttctattcacagcttcattttacacaattatgtgtatgacaatgtacaaatacattttcatcaatatttggtttgtatttctttgttggcattgcaattaagttttgacttccttcccctctccactcctttgatttgatatatcaatgtgttattcatagcttatgcaatacctgatgttaatatttagctctaaaaaattttacatttttactccaaaaatatgttttctaagtttgagtgttgtccagtagattttaactctgtctttttgtggtgtttcctcttccttggaaattaagcattaggacccaaaacaccctaaccgcaagagcttaaaattcccagagaagaattagatgtgaaagaaacaactctataacttacttgaactttaattagcctgaaagtggaatgtcagggagaggtctgcaaggaggctaggaaaacagagcaaagcagaatatcagcatatttgcagcactgtgcaggggagatcatacccttattgaggggtccatgcttaccaaacaactttttaattatcactcatggatttgcctatagaagttgccaatctactgattcaaatatacagacttcttggcccttatatttttctttttctttctttctttyttttttttttctttttgagatggagttttgctcttgttgcccaggcaagagtgcagtggcgcaatcttggcttacagcaacctccgcctcctgggttaagcgattctcctgcctcagccttccaagtagctgggataccaggcatgtaccaccacacctggctaatttttttgtatttttagtagagacggggtttgtccatgttggtcaggctggtctcaaactcccgacctcaggtgatctgcccgactcagcctcccaaagtgctgggattacaggcataagccaccatgccaggctcttttttttttttttttttttttttctgagacaaggtcttgctctgtcgcccaggctggaatatcgtggtgcaatcttggctcactgcaacctctgcttcccagctcaagcgatcctccagccttagcctctggagtagctaggaacacagatgtgagccactatgcctggctcatttttgtgtgtgtgtgtgtatttttcmtggagatggggtttcaccatgttgcccaggctgttctccaactcctgagctcagagcgatccatcaaccttggcctcgcaaagtgctaggattacaggcgtgagccactgtgcctggcccaattttttttttttatttaaatgaattacttcagcatttccagttataaagcagcctcttaagaattctgcttctcaggtgaacagacaactcaagtgtctgaacccgcagggctgagctgccaactcctggctgtgtaactcctcccagataatgcccctccctgaggtcctakctgggcttccaagacccctatttcttggatagctccatcttctctaatgttttgtaaagtttttatggaaatatatcagacatacagaggagtgcacaaagcatataagtatagttcaataaatttccttacagtgaatgcacccaggcaagctgcctccagatgaagaaataggacaatacagrccctccagaagggtaccatgtgttcccacccagtcactattactactcacatgtaaccactactctgacttttgccaccatagattaattctttcctgtttctctttcacattaattagcgcctggtattctgaatgacctaggatattaggatccgtctggctgagggtgagccttgggcaccccaacgagggtgtaattggttcagttgtgcccccctcccccccccgctccaagagatatttagaagtcctaatccccagtacctcagattgtgaccttatttggaaatagagtcatggcagatgtaattagttaagatgaggtcacactggagtagggtgggtccctaatgcaatatgattagtgtccaggtgaagacagaaacacgggaaaacaccacgtgaagacagagaattgtagtgatgcatccacaagccaaggaatgcccaagattggtggcagagccaaagctaggaagaggcaaggaaagattcctctctacagttttcagagggagcatggccctgctaacaccttgatttcagacttctggcctccagaactgtgagacagtaaatatcggttgttctaagctacccagtatgtggcactttgtttcagcagtcctaggcactaatacagaggttctgccatggtactgatccctcttctctgcatcccctgagtacacttggttcttggtcttgaagatggtccaactgagtagtggctacaccctgtccaagctgtggctctctaaactgactcamaaactgcctctcttgcttctgcttactccctgtctgtgatgtgccctgggggcagacaagtttcattatcattatattggtttttcttcatttcttgactctgctctttactacactttgagattgagccagtttgcttcctgacatgctccaggttgagccttgcagacctgcccttctgcaccttgcctgggtctctgctgaagtgttcttattcatcctcctagaccagattggggccacacctctggtgtccagtttttcccagttcctttggccccaaaaatatctttgataggaaaaaaaaaaatcagctcactttattttttaaatgaaatcctgattttccaaatagtgtggcatgttgtaaataaaggcttcattatgctgaactttggcatgtcaaagattccttcttctttgataaaatagaaaagccctcagtttaaaaagcagcccaacaattagactttggttagtaatagggaaccatgcagagcatactagacrtgggatgttccttactcattgaaagatcgtctttaaactgccttacaacttttttttttttaaattttatttatttatttattttttgagatggagtcttgctctgtcacccaggctggggtgtagtggtgtgatctcagctcactgcaacctctgcctctgggtttcaagcgattctcctgcctcagcctcctgagtagctgggattacaggcacttgccatcaagcctagctaatttttgtatttttagtagagacggggtttcaccatgttggtcaggttggtctcaaactcctgacctcaggtgatccaccccccttgacctcccaaagtcctaggattacaggcgtgagccactgcgcctgtgaacttatctgttttttattttgggctgagtttctggtgttaggggaatcacaaggacagtactgttgtgaagtccccagagtgactctctaggctcaggccagttcctgtgttcttgctttgggacctagggactctgctggtggcatttcttttaaatcctcttagcacagactgtcctttggtctttaatgtcctcagcctagagtggatgtacattcttcaactgtccctttcttttctgttcagaagcagtggaatattgctagcaactatgggaaagtcttcaagacatttttaaaaatcaccaactttcagaagtttaggtaatcctagttttggtttctggtctatttgacattcttaattctcttgttaagcctctttcagcttctagctcctgttgtttatactgggaagtattttgcccttggaggagggagttttaggctaattatatattatatataatgcacattttatgtaattgaaaaaatataaaacagtacactttgtagttcagaggtcagggatagagcaaggggttatgtgtatgttatgttttattgtctgtgtttaaatgtgtgactacatgggcttgcctttagtacatccatactctctcggctcagacagtccttacacyctgagatttcatggcatgtgatagatgggtataattatctgtgatggatggttggatggatagatggatgagataggttggttggatagatggatggatgagatgggctgagatggatggatacatggatatatggatagatgaacaaatgatagggctgctccatctgcttggtcggttttctcactaaactattatgctagtgatatgaatttcagttgatttcaggggtgcctcctgaagcttggaagcgttttcctaagcccaggaggatttcttaagcttcagagatctagaactgataactccttagcttggctatggaatgtactaaaatattgttctagtaggttgtgaaagtgaggccaaacagactccattgtaaccctcagtgtactggggtgacgtttttcattgggagcccagatttttttttttaatttaccttcttggggattgcgtacacttctgtagaagatacttttcttctcscctctgccccagaagagaaatgccctttgaattttgtattgtattttctagactgggttgttttataatgtgaataatgtcgtcagtaaatagttatccatcttttgaaagatctaccttttaatgttttctcagattcttctttatagaaaataacgttaacagtgaaagaattccatacatgagtcttcacatttttgtcagtgaaaacaaaattatttttttaatttttaaaaattatgcaatattatttattttattttaatttccttattgttacatattatatgtatgtattttgggggcacatgttatagtttgatacattcatataatcacatcaggataattaggatatttgagtcttcacatatttgttaactagatttcagtttacacttgataataaaccktgttacaatgtctttgaggtaacatttgccgttcatgtaagtagatcattgtttatagtcacatcatttataagtctaaccacttcaagactaaagaccaggctcgttcatgctctgtttaatagtcccctttatcagacattgtctatggtatgtggtaggcacttcacagtcccttgattctaaaaacaatgtggtaaccttcctgtaaggttgtgccttggattattttctggccagaacacagaacaaagcattccagagaaaccttggtttgtttatctactttcttcaatgcgctcatttttkcagccccgtcagtatggttatcaggaagagaaattggttataagaagactattttctgcatctactttctcttcaatatgttttgttttcaacagcgttattatagattcacataaactggaaatctttttctgttttatttcctttttcagagattcatagtgttttaaatatctaggtatcttcrgatgacttgagctaccaaaggtttatgttacatgacttaaactaccaaaaacatgtttatgttttagaaaaaaattctatttaaaaatgaaacgacaattctaaagtatttctagcaatttgtacgattcactagcttagtaaactgtttttaccagattggcaaaaagtgatttggctccaaaatgacatttagataatcaagtctctgaaaacaacctaatttctactccaaggaatgtacaaatttgtgatgtatttgtttgrtagaatagagcatttaaaaagaatgaaccagatctttaggcaccatatggatagacctaaaaattaaaaatatagagtgataaacacaaatttcagaatattatgtatttgctattcaratgttaacactgaaaacaatatcatatactctataatgtttatgaatatgtatgtgtgggtatgtgtttttgtgtgtatatataaaaaggggactgactatgtatcaaatccatgatactgggaggagaggaatgggggtagggaagggaccataaatctagtttaaaaatatctttcagaagagatggttatttttggtaatgagctcatgggcatttattaaattaacatttggacctctattaatgtttttgtgataaatatgcataatatttcctaatgaaatagatcacaactaggagccatacatttatcaagattctgggaatgagactgaagctattgttaggcacacctaatatttcatgatgtcattctgtgcaaattgaaaattaacagaatgaattttgaacatgaggaaagcttcaagttgatctcactcttgggaagcttacaggttgggaataaggaccctggcagcaaactgcctaagagcaaaccagccttgataccttttagcttaagaccttgggcaagtcatttaacttctctaggtctcagtctccttttctgtagagtcagaatagtagtgcacatctccatctcagtgctattgtggggattatatgagtttgtgcctgtgaaacctggaatgtagtaagtgtgcaaaaaagattagctattattttcttttcttatttgtatttatttatttttttgagacagagtcttgctctttctcccacgctggagtgcagtggtgagatctcagctcactgcaacctccgcctccgggtttaagcgtttctcttgcctcagcctccctagtagctggaattacaggcgcctgccaccatgcctggctaattttttgtatttttcgtagagacggggttttgccatgttggccaggctggtctcgaactcctgacctcaggtgatctgcccgccttggcctcccaaagtgctgggattacaggtgtgagccaccgcgcctggcctgcgctattattattttcatcactgcccctgctatctgcagcctcggttctttgagtgtaccattttcattctcacctcagaatctttgcaaatgcttcttcctctgcctggaatgttctttctttctaccctgttttatctgattaactcctcttcatccttcagagacacttcctgtccttccctatctggatcagtccctagtcaccctacaattggaacttgatgattacttgtgaactacttgttaatttctgcctttcttgatgaactgtaaactgtttttcttcttcgctgctgtatctccaaagcctaaaacagtgtccagcacagagtagtcagtgagaaattctttattgaagaaatcaacaaagttaccctagaaagtgaaaacattcagagttaaatttagcaagaaatgattttgaaattcactttgccttaaggatcaatccactggttttaggaaataaatctaggattgtttcatttcataaaaaaatctatcatatgtattgatttatttgtaataataaattataagttgccctaaattaagattcacctcatatttgtaacttagctctaggaaatcatctgattgatagtggtatatgtgttgtcacattttcatttgctgtggagagcaggacagtttcaacacgggaattttaaggtttggtatatgctcatctgattgttcacccttaagctaactcatttctttcttttaaaaatagcagaaaaggtaagggaaaaaaatcagattggagaggatatttcctaagggccagaataatccaggcttattcagaataaattggcataataagtatttgaaaacagaactttcaaatatcagatgaaatgttatttataacttttaagcaaactaaaacagtaaactctttggaagggggacttttagaatcaggaaagacagaaacttgttcccccttagttgtagttttatttaccctgggagaaaaacataagaatgctttcaagtgtaaggaagggctgtgtattcagatatcagcatactgctccaagaaagacatcagagagttttgaactgattgaaagcccaaatctrttggatcagttgaggagcagagcaaaatatgaccaagcaataaacgagtacyttcaaagcttttaagaaattcttatagtttgtataggtggttgggaggtgaaattccagggctaggaatataatgtaaagccctacaatgaaaaagaagactgcaaattgtggccttaggggactttccctgccccgttcagagacacatgatttttttttaacagaaatccctggaaaaattactttagagccatgttttcttgcattctgcattttcattaatggtagtatactgaaatcacaaattcattcattcttttcttcatcagagcacatttacttagttttaagtactttccaagctcagaataaggtcaccattcttctatggaagtgaaacatctcttctttagaattgtgcaaaattaattactggttggggtatgaccttgggggtataggatataacatgtttttggacatttgaatgtgtggactcacaaaactctgctaataaccacttaacctatttattaatcatctgcctcaaaatcagggctgaagacttttgaaataatgtagttagaagactctgtacagtgaccatactttgggaaaccctggtttaagtaacattcgaatgttcctgttcaccctaaattcttgccactcaaagcaggggcttcagactagcagcactggcattcttttttttttttttgcatgatttgggagcttgctggaaatgcagataaccaggccctgccctagacatgctgaatcagaatgagcaacttaacaggatgctcaggtgatgccaatggctattaaagtttgttaagcactgctctgcccactcctgccaaatggactttagaacatactagtaatgtgtgacccactttccaagaatgcatcctgtattaggcagtccaaatattagcaaggtcttcctagtactgagctcaaacttaactccttgaattttgcattcactggccttggcataactgcttggtagccatcagaaccaagtaaaatcctcttcatgaaggaccttcaagcctgtgactaggctgtcttgtttcyttccttgatttaagcttccccaggtgtaactaaatccctgtttcccccagtatgacagtgcttgaggtttctttaccaacttatccagactaaataatcttttttttttttttgagatggagtctcgctctgttgcccaggctgaaattcagtgacatgatcttggctcactggagcctctgcctcccaggttcaaggaattctccctgcctcagcctcccgagtagttgggattacaggtgtgagccactgcgctcgtcccagactgaataatcttaaaggacccttccaactttaaaattgtgatggattctttagtaataagtaatagtggatagaagatgatggaaactcaggaactatactttctatacatttaaggagagaataatcctgaggcacaaatatatcatgatccataatttctttaggttcaaaattctgtctcatggtgaagacttctctaatagtaggcattaaacagcactcctttgcttttctcttgatttctaaatgggtttgctacttaacacttcaaaagtgaaatgtatatagagatatatgaaaataagcactttcagtttctttgaaaattgaaacatttatgtacttaaaaaaattctctgtaatctacaattcagcacatcagctgattttgtttttctttaatgcctttcagtacagtacattctcatttaatgtcattaataggtttttggaaactacaaccttaagcaaaacatttttgttcattgtcattttattattgatgaaaaaaattggttttgatgtaccttactttgctgaaagtcatagtttccaagaacttatgaacaataagtgaggatttactataaggtgttacatatgcatatgtctaacaaatggaaataatcttcatgtagtcaacttttaaaaactttctttggtaaaatctattttttatgttactatatgattttcataatcaagcataattatttccctgtttaagggcattagagttcataaatggcctatgaaataaaatatttgccaattttaaggtatttgttttctaagaattttttaaaataaatatattctaacagagaccatagcagcagaaaaaccccaccttcatcctcttaaggtcccagctgggtccaagaattaaattgacataagttagattaacaggagaaaagcatgcacattaattttacaagttttatgtggcatgggagccctcataaagaagtaaagacgcaaagaagcagttagagccagttacgggcatggctcattttattgtatttcatagatattgtgctttttacacattgaaggtttgtggccaccctttgtccaataagcctattggtaccattttcccacagtatgtactcacttcttaccattgtgttacatcttggtaatcttaatatttcagattttttcattattattatatctgttatggtgatctatgatcactgatctttttataaaatatatatttttttctttctttttaaattttatttatttattttatttttttgagacggagtcttgctgtgttgcccaggctggagcgcagtgaygccatcttggctcactgcaacctccgcctcctgggttcatgccattctcctgcctcagcctcgcgagtagctgggactacaggcacccgccaccatgcctggctaattttttgtatttttagtagagacggggtttcaccgtgttagccaggatggtctcgatctcctgacctcgtgatctgcccgcctcggcctcccaaagtgctgggattacaggcgtgagccaccgcgcccagctgatcactgatctttgatgttactattgtaattgttttgggacaccacaaactacaccactataagacagtcagcgtaatctataaatgtttatgtgttctgaatggaccaccgaccagttttttccctgtttttcttcctccccttgggcttccgtattctctgagacacaacaawattgaaattagtccaattaataatcctccaatagcctctaagtattcaagkgaaaggatgagttgtatatctctcactttaaatcaaacgctagtaatgattaagcttagtgaggaaagcctgttgaaagccaatacagaccagaaactatgcctcttgagatagttaaccaagttgtgaatgcataggaaaagttcttattacaagtgcttctccagtgaatacacaaatggtaaagtgaaagccttattgctgatatatagagagtattagtggtctgaatagaacatcaaacaagccacaaaattttcttgagccaaagcctgatcccaaacaaggctctaactcttttccatgaagactaagggaacctgcagaagaaaagttgtaagtcatgaggtttaaggaaagaaactctccataacacaaaagtgcaaggtgaagaagcaagtgttaaagaagaggctgcaacaagttatccagatctagctaagataaatgatgaaggtggctacactgaacagtagattttcattgtagacagacagtcttctagtggaagaagatggcttctgggacttttatagctagagagaagtcaatgcctggcttcaaagcttcaaagggctggctcaccctcttgttaggggctaatgcagctgttgacttttaagttgaagccagtactcatttaccattccgaaaatcctacaacccttacaaattatgctaaatcagccaagtgcggtagcttacgcctgtaatcccagcatttgggaggccaaggcaggaggatcacttgagcacaggagtttgaggccagcctgggaatcatagggagaacccatctattaaaaaataattgtcctaaatctactcatcctgtgtgctataaaggaacagcatggtttactgaatagtttaagccagttattgagacctgctgcttagaagaaaaagattgttttcaaaatattattgctctacagtgcacctaattacccaagagctctggtggtgttgtatgaggagtttaatgttgttttcatgcctgctaaaacaacgtctattctgcagtctctgaatcaaggaataatttcaacattcaagtcttattatttaagaaatatagtttgtaaagctctaggtgtcacatagatagtgtgtctaggggtcacatagatagtgacccctctgatggatgtgggtaaagtaaattcaaagccttctggaaagaattcaccattctatatgccattaagaacgtttgtgatttatgggaggtcaaaatatccactttaacagaagtttggaagaagttgattacaactctcagggatgactttgagggcttccagattgtagtggaggaagaaactgcagattgatgggaatagcaagagaactagaattagcagtagagcctgaagaagtgactgaattgttacaaactcataataaaactttaatgaatgaggattgcttcttatgcaggagcaaagaaagtgattccttgagatgaaatcarctcctagtgagaatgctctgaactttgttgaaatgacaacaaagggttaggaatagtagataaatttagttgataaaacagtggcagggttcgagaggattgactgtaattttgaaagaagttctgtggctaaaatgctatcaaagagcattacatggtacggagaaatattttgtgaagggaaatgtcagttgacacagcaaacgtcattgttttattttaagacattgtcacagccaccccaacctttagcaaccaccagcctgataagttagtagccataagcactgagtcaagatcatccactagcaaaaagattataactcagtgaaggctcatatgatcaatcattagcatttttagcagtaaaatattttaaaattaagatatgcacattggtttttagacacaatgctattactgcacacttatagactgttgtataaacataacttacatccattgggaaactgaaaaatttgtgacttgctttattgtgatatttgctttattgcagtggtgtggaactgaacatgcaatatctcttcagtgtgtctgaatttattttttatttatttgtttattttttttgagacggagtctcgctctgtcgcccagcctggagtgcagtggcacaatctcggttcactgcaacctccacctcccggttcaagcgattctcctgcctcagcttcctgggtagctgggactacaggtgcctgccaccgcgcctgactgattttttgtctttttagtagagactgggtttcaccatgttagccaggatggtcttgatctcctgacctcgtgatccacctgcctcagcctcccacagtgctgggattacaggtgtgagccaccgcgcccggcctgaacttatatactagattgaacataataaactgtgaaaatgcagctaaattgtgtggggaggcttaaaagataagagttatttcaacaagctctgtctcaacatcttgtctttgaagataaggatgttgccattttttctagtataaagagggtatcttccatgtgggaatttcattttctgcttttaagaaacagcacaagggttaatgagatattcatgcagctgctatttttcaagtgcctttaacttaaataggcaaaataccggaatattaataccataataatggacttaaaatactccataaaccatgctgttcttttatagcacacaggcagagtagatttagcataattgtttttaacgtcctaaagagcatgcattttgtgtgtgcgtgtctgtgtgtgtgtgttagtcttgtgtaaaaatagctgtagcaagagaggtttgagatttttttcatttttttttttttagaaagtagcccacggcacatttttaaactagttgttctaatacttcacccacacttctttttccctcactttcttctagatatttttattcttcttgatctcctcctcattctcctctctccttctgtcccttcctcttctaatgattttcagagaaatagatacttctctcacctcacctctgcatttcaaaataaagctgcgtgtatgtgtggagagaagctggaaaagaagacagatggttctttcattaccaggttacttgggattaattgagctgggtatgttattatttttaaggagactgagctgggtcctttggaaagccagttctgaaaggcaggcaataatgtaatatgtactgttggattttttgttttgtttttgtgtttggtaatttcatcatcctgkaaarcattttttaggagatcagaagtgagtttactaaaatggcgttttccttaaagttttaaaaatgactttacatttttctggggcagctgaaccattcttagaaacatactatctttatgttttatttcagcatttgcaagtgaggaagcagcacaaccctgggttttagataatttctaacagagaggccccagcaattcagcaggcagcrtcctgagtctttggcagcctggtccctctttcgcaaattctccacctttgcgaacagagggtctttaggacacagattcttaaaagtgcaggtaagcaaaggcaacaccaccattgtctcaaattgcttaaatgtaaacttgagcacttgtaatgttcttatacaatgcttctcttgtgggtgatgttaaaatcccctcttctatgaatacaggtgcctgctatttttttctcttactagttttgcagcctgggggcctataagactgctaatgtaacccatgacccttcagcatatcccacagttgagctatgagagtcttaaawattatttttattctcagttgaatgggccttctttgggactcttcttaaccaatacataagtgaggagtaagaaaactcttaaaattagaacattatatgcatcacaaatattatagaaattctactgttaaccagctttatattgggcaagagggtttccctctttgggccttgttttctcaatagaattaattccagttctctgtctttaagtgcaacaattaatgatagtttcattaaagtaccttctaattttttaggctgatttttcttactttttttggaatcctatgcacagatttcagacatcaatgtataactttattctgaaaaaagatctagagttcagatgtctaccaggaatgaactacatgttttacccatgaatatatgcaggcactcaatgatttattaaggttcatcagagaatgattattctagcaaatttgtttggagatctttttgggaaagacacttattgactgataacattatgctttagtagtgctggccaatatggacactcataatggtcttgtgatttagtcctagggaacctcttaagctcttgcttgttcctattgagattgctcatgagggtttcaaagtccttccccagcgtggtccttagccactggacttgcagaactcttgaggacctgaatcaaggctggaggtagggctggatcctcaggttttactgccagcaacacctcaatttagtggaatctggactgtaatcatcttggtgatttgtaaagctgtttttcttgtcaatctttaccatttctggcatcaaaaagatggaagtattttgagagtctttgtgatgctcctggactctagtacgtgcttgggttcaagtcccagctctgtcacttttgatttgggtatcccgggggaagttataacttctctgtgctttggtgtctttatctgtatgatagggatgacgataaagcctttcgtaaaggttggttttgaggattaaaataagtctatgtctaaagcatttaaaactgttctatcacataagcgtttagttaattttaactgcttttttttcttttttttttttgagacggagtcttgctctgttgcccaggctggagtgcagtggcacgattttggctcactgcaacctctgcctcccgggttcaagcaattctcctgcctcagcttcccaagtagcttgggactacaggcgtgcaccaccacgtctagctaatttttgtattatttagtagagcggggtttcactatatgttggccaggctggtctcgagctcctgacctctagtgacccacctgccttggcctcccaaagtgctgggattacaggcttgagccaccgtgcccggtcctaattttaactttttattggcacctgtcatacagtgtttattcttctgtccttattctctagcctagggtgagaaaaattccagtctttatccttaccttgttaaacwttgctagagtcaccatggtatttgcttcaacacctaggacacaatatctgaatccttctcaacattataatggatccaaatgagaatgaaacctatttcatgaaacctatttgccaactcagattgtttatagagttcttgatttttatttgcttgcttcaaaacataaatttgaaatgttgtttacaaatctgagttttttgtttgtttttactaaatttcagagcagttttattatgaaaagcataaaaaagatatggtttctatagccagaaatagggtctaattctaagatgagttttgccagtgaattaatactattttgaatgcctttcactttatattcaaaagcagatgagtaaagcttcctgtcacagatactttaagatgttaaaatgattgtgcagcaataatagcacagtaatggaaacttaatttttcgaggctgttattagcacaaagtcatgagttctttagcatctctaccaggacattaggaagctaagtttttagggagggcttggtgcatgggaagctgatacttcactaattttaaaagaagaattgaaacaagattaggagagtctttaccatgtgccagttacttacctaagtattttatatttactacttgtaatagctctattaggaagtattattatttcttattttacagccaaggaagctgaagtgtaaaaagattaggcaaattcccagggtgatacaactcatcagaagaagagctgagactcaaactcagggggtctgattgtcaagcaaacaatcttaacacctaattatgctactacctacaaagaataaattgccaatgaattattaagaccaaatcatggaagtcttaaataccaggcaaagtgacaagatgagagctgcacttcgaggattttatgccaagtacagcgtgtgggctggtttaaagggaagaaagattagagatcattgctagtagctaaggtgagaagtaatgagaacatgggtttaggaaacaggattaagataacagcttgaaaacacctgtatttaggtggacagaggaagaagaggaaatctagaaacacaggcagagaagtagaggagggaggccgtgtagtgctacccaaggggagattctggaactgaaaaccgtagagatcagagaggattggaacaaaaacaaagacgagtgggtttggagatagtaatttatttattcatttattgacttttttactcatgaaataagtaaatattattgtgcacccataatgtgacaggaattgtgctggaggggaacccgtgtaaaatgtkcttctttattaccaactttgctacttattagcaagatagcctttgacaagttttttttttttaaacttttcaaaatcctggctgcctcttctgtagtatgatacgtaagtcctcactgtgtctaaatgcccccaactcttgcggtcttcccagctctaagatctgtaattcttgggttcaagttgtaaattgcaataattggaaatgttgtaaatatgtggccaatgattcagttggcacttaggtgaatcagaaggagatgcaagataaggtgtgtgtcctatagctgtaatgtgaatggaggaatcctacatattttccctcaaaaatactggtagtatcatactgacactaatagtagatggaaggatgagactgaaaataatacaggaaagacagtgtccagggaattaaaaacaaaaaacaaaaaacaaaaaaccccacaaacattccctagagtggtgagggaaatttttctcaaagccacttattttcaaagggaatctgactagtttcttcagagaaacttctgttgattgaaaactttcaaaggtcaagccctaaagactcttaaaagatgtagcataaaacttagaatgagctgccagttcccctcaaaaactgttttctgtgaagccctgatcttctcggctggatacaattccttttttctctgaccttctccagcagtgcttctcaaacacacagatcacatggggtttgccaaaatccacttgactcagtggatcaaaggttggagctgagactctgcagctctaccaacttcccaggtgatgccagtactgctggtccatggaccacactttgaataacagaggtgtaaaatagtttgctttaattctcgtagcagataatggaaataattttgaaacagtgtaacagctccttcaccagactgtgagctctattctccatatcctaaagtcgagtacgtacacattatgaaattcttgatattaatagataagagattcttacctcggtcagtgatttgtattattcaatagcagtaataatttgaactggtataggtagggcttttttttaaactgagataagcaccagcatgcaatataactgagataggcaccacaatgcaatataaagttttcatataaagttaaacgtgtttaccatatggcccatgaaaacgtatatccacccaagaagttgcacttgaatgtttaatgcagttttatttacaataaccaaaaattgcaaagaaaccaaatgtgtattgcctgataaataacttgtgaactgataaatwaattgtggtatgaccatacaatgggatgctayttagcaacaaaaaggaatgaactcctggtacaagcaacaacttgagcatttttttaaaaagtattatgttaattgacagaagtcagaaataagatatatattatatgattcaatttatatgaaattttagaaaagcaaaactatagtgatagcagatcaggctgctaggggccaggaagtgggaagaaggaagtgactacaaagaggaacaaaggaacttttgaggttgatgacaatgtttagaatcatgacttcagtggttgttacctgatacacttaaaagtggcgaattttagtgtataaaaattttatccccagctactcaggaggctgaggcaggaggattacttgagcccagaagttagagaccaggctggacagtatagtgagaccctgtctcaaaaaaaggaaaaaaatgaataaaggcaattttaaaaattacacacaggctgggcatggtggctgatgcctgtaatcccagcactttgggaggccgaggtgggtggatcacttgaggttaggagttcgagaccagcctggccaacatggcaaaaccccatctctattaaaaatacaaagaattagccaggcatggtggcacgtgcctrtagtcccagctacttgggaggctgaagcaggagaaattgcttgaacccgggtggtggaggttgcagtgagccaagattgcatcactacacttcagcctgggcaacagagcaagactccatctcaaaaaaaaaaaaaaaaagtagccacagtcatcaacctgttaacaacatctaatgcttcttggaagctgatatcttattagcaggatgttaataagagaatacagggacaatttttactttaagagaataaatgggcatggaaagaaaatgtgaataaacagtaggaacaaaagaagttccctaaaagcttacttgtgtacttgcaatggacctgagtctgaagagagagctcttgaaaacaggaactccagttcttctatttttagcatcccatatagttgctattagctgaatgattttagtgtgtcctgttgtgctattaaagaagaaaattctgctgagaagtcatttctctcctttttatattctttgcagtgagcacaccccactttcaggagaggatctggtcatctgctttggcagaaggcttatctttaattaagtgaaaagatctgtctacatgtgctaaggacagtgaaagcactggtgaaagcactggctttgttgaaaagctgaaagagaagggtgtttgtgcatatgcatgtcggaaccagcttcatatcattgtattagcagaagagttgggggaggagagggaaagaaagttaattatacgtgttccctttctgcaatgcagaaagaaaatagttatattcttagaaatcagtcaaaatgtatacagctgatctaatttgttgacactacacaactcaatatttttggaggggggcataaatcagattttctgttaatttactcagcaatgtcagagtttttttcttaacttgtattaaatagcattagtttataacttcagattaaatttagccttttcgttgtaatattgtatgtttaaaaaatctatatgtgctgttttttatttctttaattatggtctattgagaatttcgtcatccttctagcagaaaatcccatcaaccagactactgattccttaggatttctctctttaattatgagattaatagcttttcatattataatgtttctaaagaagtgtgtttgataaatgcataatttaatgtgtatcatccccttgttttatttttaaaagatattattaaatgattatttaacagttcatactcttaaaaatatggttattatagttttctataagccacaatttcaaagtgtgggctttgaaatcagatctcagtttgaattctggccagtgctctgggtattaaacatatctagcatggggatgaaaatatccgtgatttcatccttatgtgaaaaagggcttagtactgtgctggccatttagtaagtggttaataaactgtgctatcatttacatgatcatcgctgccagaggttgtagatccttgggatatgaatgaagctgatctcacgcatttggactacctaattagtaataaggaccaaacctaaaagagaggtagtaaatgaattgaggaggactgaggcctttccattcatcactgtggagtcctgtacattaaggctcaggtcatatggagatggctgggtctgtgaggcttaggcttaggggacctatgaggctggaccaaaaaaaatctagacattaatgcatggctagagttggaggttctgttgtagatttgctcatgtaggcatgtgactgcagattataatcacaaattgagtaataagtacaaagaggaaggaaggcaggatgtgaaatctgttggccatgttccacacagtctggagtgtatgtcagtgtgagctgaagaccagcagagactaggatggatgacggcctgtccaggggctgaatggacacaggtgtcagcagggccacctggtaaaggtatggaggtgagccatgaacaaggttacctgcttaaggggaaggttgtggcttaaatctagatgctgctgagatattagacattaggtgcccacaggctgtgtggaggtagaagggggatgtgcttctcttatttgcacaaagatgtgagttactgaggagtattattgaacagcagcatgttgggtttgagaagagacctagtagtagaaagagtagtatgtctgccactgaggaagcagggaacagaagggtgcctcaccccagggcagatggggacatggtttaggatcctagtgactaaaaaaaaaaaaaaaaaaatggaagtttggctgcagagctgctagggtgactaggaaagagaagaatgcagacgttggaaaagtgtggtatagtttaagcacccagcagcaggaacccaggtccagtggatgagatgaccaggatcactactggatccacaggaacctgacccaactgttaagctgctagtcgagggctcctcagactctctttctgtgggtcagaatcagtcccagtgcctggggtggctgggcttgcagatgggcattaggaagcacctgcttccagactgaaacagaactggggatggaggagacagggaggtgaggtttgtgtgtgctcagcatccggaatagagaacgccaagggtctttcttccttggtgttgcatattgactgagatacccaccgggtttttctattaggttggttttaaatgacaaaaaccacaattacttttgcactaacctaatgcttgataagtagaacaatgtttctagaattattgctgaacatgcttttttctagctggttggaaaagcaagctccctttggtttgagaaagcattaggggagtctaaaaaaaaacctgacatttttttcaagtgtttctccgtagagtttgtttttataaacaatgctagcatggttgggaggagcagaactgggaacagggttgggagtaacaggcttttatttcagctgagtttgaatcaaaagtattataagctttacctccatttcatcaattactagaattgatattgcttaaggagcttgcaggattgcttaagttggagaaatgttcagtaatgtttagtctggtagcaaaaggaggggcctgtgctcacttgtgaaagctcacatctagggggaggtagtataacgcatggcctgtggcctgatagagacagatttgagtcctcgttctgctacttgtcagctcaacaaagtcgttgcttctcccagagttttggtttcctcctctacaaaataggaattgtaagtctaccacttcttttgcaaggtggttgtcaggatgtcatgaggtaatacaccaaaagcaattatcacatgccttggcacaggctaagcactcatacatcttaatgcttctaatcagttgttattcattgagcatttaccacgtgctaggcatttagggtaaaaaaaaataatacaaagcatctagttatgggatctgtatctgttacagtctctgtatttcagaaattcttccatggttctattgtatttcttagagcagtgattctcaaaattttagtgtgcataagaatcaaattggtggatgctgtttaaatgcacattcctgagccccagagattcagattaagtagaggctcaggagtgtgcatgttaacaagtcccygcctggtgcagactcttgagcctgccctagagtcacctcctttcaccaatatctgaatttacccttctagacttcaagataccaatggaacaccattaggaattttcagattagaattatctcttttagatttgccttgtgctttttatcttgagagacaggataacaccaggaatggaactctgagaaagaaatgattgaaccataaatctatttctgtcttccttaaactgtgtgacctcagacaactcaaccttataaaccttcagttttcctcattcatcaagaagacaacacctgcacacccatctaacaagcttattttgagccttaaatggagggatggacatataaaagattttttatgaactttgatgctccacacaaaatatgcttttactattaaagcaaagtgaaacatttgtcaagattgagtttaatttggcatatataggttacttatacattgggttacatatcttagttggagaatatgtgaacatttgtcctctgccagtgagtccttctttcccttgccatcctctacccacatttttgtaaaggatgttttagggaccctgattttaggagcatctgcagccacaaagctggcattggtcctgtttaatgtcaagatcttgaaaactcttttttttggtaatcaaagctatattaaagggccttatgtctttttaaaagcagataacctcttaaattctstttttttctttgaatgtttttgctcaaagcaaaatgcccttccacttatacaatataattagataattggtttatttgtggaagctttttcctgtgagcaagcagaggaaccatgtttatcacaaggatakcctggctggcccgtgtcctttgcaacttgaatactgaagctgtgaattgtacatgaaatacgatagtgccttaacttcctaaatgtttttcaggtggcgtgtgcagtagctgttcaagagtgggttcgttttattgtttgaaaacagagcattctctcacacttctttgtttttaattagaccacatattagtgaatgaaaaacaacaaaacaataacacaagtctcgcttacccatacctccgtgttctgtagaataatacataaattgcccaaagagtatgttttggagaatacataggaattttgacttgtaaatactgacttctttccctagaccttcatatactgtcttagatgtaaatacrttaaaaaattttgctgatactggtaagttttatccttgttggatctttgcataaatgtcattctttttttttttttttgtgaaagggagtctcactctgtcgcccaggctggagtgcagtggcgtgatctcggctcactgcaacctctgcctcttgggttcaagcaattctctgccttagcctcctgaatgggtgggattgcaggtgcctgccatcacgcccggctaatttttttgcatttttagtagagacggtgtttcaccatcttggccaggttggtattgaactcctgacctcgtgatccacctgcctcagcctcccaaagtgctgggattacaggcatgagccactgcgcccagccaaatgaagttattcttagtggagccttaaatgtttgatttgagcatttaataagatgttcctcactattttggcccatggtaaactgccttccaggaccatctaataacccaaagaggtagatggtgtgttctcacttgtaaacacatgaggaccctcaggtcagaagaggtagactgatttaccttagggtccccacaccatatgtagagttaggctgtgaatcttgtcttctgatttccaaccagtgttgactcttcacagggattatgtatacctaattagaagtatgtgtgaactaaagtttgctcattaacttgcttatttatttgctttctcctgacatagttttcatttctaactaatttagaatagtggcatgtgggggtggtgactgcattaatagcagcaagaaccaacagctgacrgcaagggaggagtgaaaagcaactcaaccagataatcatgccagtttaggactgcttagcaaatagccccacacacccattagctgcagagggtttcaactgtaagaaagcccagaacaattatatttgttgagctgaccccatattatcaagaaaagtttaaattatgtttagtatattctacttatgaaggcaaagggagtggtttattttaagatttccatttgaacatatttaccattaaaaagaaggcaatgccatattatttggaaatttattcaaccagactcccaggttctatactgcatcgccatgattgaggttaataggcatggataggagtgaaaggagtggcacatgcagttgtttagacgaactagaaacttgataagggagacagagaagcagtgtacctgtttaaagtcacaggcgttgaaataggtctattatggaaccatatgttaaatttgtcttttacatttaattacataagacaatggaaacttttccttttttcctttgaagcaaaagagaaaaccaaacatgttttataggttttwaaaatatattctataaaggctttttttgcatttacattttagagaggattgtgtcaaggtttttgtctgtctgcaaatgtgtaatgaataatattgtcaatttaatacaaaacaagcaagtagctgaatatacctgaactgtgatgtggaaaaatcaaataggtggatctaaaagtatataaaaattgaggatgagggaaatgttttttcagtagcttttttcctcagttaaaaattagaaaatgacttgtaaaaattataatgtataacattttaacatcatttcaagcactgaagaaatgaaatattcacagtttaaggcatctattcactttctactgagagagaaaatagataggttttaatgtttgtgaaaaaagttttggatatggaatagatgtgtaaaattttattctgaaggaattatttctttcttacctaccatgagaaagtagtagggggaggcccctacctttgagaccgtggaactgtttattggcctaaacatacattatgttgtgcttattgataaaaggagagacagaaaaaacattatctttctgcacgtttagtgagtatttccaaaattacatgcccacatcatttttttctatagttccttttgtatattttttccaataatgcttatatttgrgccattgtgaaaatccatttgtataacaacctggcctttgctttggacttcattccttgtgtttcaggtgagccagccatgagagggtatcttgtggccatattcctgagtgctgtcttcctctattatgtactgcattgcatattatggggaacgaatgtctattggtaagtttcattttgttatttaaaaataactctcaacctagtctttcacacaaatccacaaattatagtagagggtcctatgaaaaaaacttgtaccattttgaatattttcttgctttccattgtaaattggggttttaccattccagtatcctatagattgtatctcgaacaatttaaaagttgacaagcaacacctactttctattgacttcccagggaagccatggtgttaaccatctttgggttataacattctttctttatgctatagatcatctccttgagttaatggcgtaattactgggctcagtggtacttttggaacctaaaatgcttgcttaagagattattgataaaatacagatattacatatggtttcctttgtttaaatatatttggtgaacgatgatatatgtatcttctgaaatagctttgacttgaaataccacatataaaactttgaagaggcacagatagttttactgaagagaaagcctctgtaatagggattttaaccttctcattgtcagtcctttggctaggaaaaaagttttgatgacctttaaatcccaagcgggtggcagtacataattatgctaaaataaatcacataacttcctgtcttagacaaagagtcagtattttttgccagtgtttcatagtacatcttagatcatgtttctaacttgtgcttacttgatgaaaaaaagctgatgcttctgcatttgatttcattactggttgattgaaaaataattgtaatgcttttcatggaaggacgttaggcaaatggccactggaaaaaacccaatgccaggtggatagttttggccctaaagttttaggctttggacccaaatatcgggctagagaattttgaagtctgattatgtactaaatgaggactacatcaaggggatctatccctacatctttgccacattctctgtcctacccttagtagtagaagacaaaaatagaagagaaagcaaaaagcttactagattgctactttcctacaaatcctattgttggtcacagggaaaatgataaagaaggtgatgaaaaggatctaaatcagcagtcttttgtcatcagggttgaagtgaccatgtcactcctcagctaacacattactatagtcacagcaagtaccttgggatattagctcagacagttgtttgtgcaatgaacttgcttccttaaaaatgatttaagacatataattgtgtttttcttttaaaaagtcacccaaaggttgtcttcacaatatcctaaaactgttttctatgttttaatgactttagaaatcaaataatatcttcatgttatcctccaaatataattgagattttttggtctagtgtgctggtccaccatatttatgtatcttccttatgtataaatcaaggagtccttgccattgtggtattcacaaaagatgttttcctgcgtaaggagtttactagcctcacagttcagaaacctagcaattctaactatggggattttgtacccacaaaaatggaaaattgtgtctgtccatgaagggtttagggtatttccttcattttgaattctgctgattatagaagaaaattgattagtttttaaatatgaattcttcacataaytgatgatcattaataagtttttgtattaagctgttttcctctttcccagctaagtctggatcctgccatccaccacccctttcatttattttccttgttgtgctctgtcatgtttcacaatacccttttaaattgtggagacaagtactccattcaggagcacacaagggcctaacttatgccaagaatagagaagagttagaaatgactctcaatagtgtgatttgtagagtcccccggatcccaaggcaagggtctatggaacctgttcaggtcaggtgtttctgtggtgttcgctgccggtgtgcstcagcagatgtggcaggaggaggtaaatagccacgtgcccttggggtgagtttcggtttctccagctttcagggacttctaaaaagtgarcctggttgcagcttctacaatgcagtaatcctggcccttctctgaaggtcctttgaatcattgctcttggaatcacttctgggttgctcatcacctcagcttttccaccctccctttccttacatccatgaatctcaggtgtgtgtagggcttggagaaggtactggcagacctcaagaggtgcagggagtatttttgtttgctgccacagaacctctcagtggtggcatgaatgagttcccagggcatttgcttccctttgggcagggtgcccgrttctggtttctgactgacattatttttgtctcatagggtggcacctgtggaaatgaaacggagaaataagatccagccttgtttatcaaagccagcttttgcctctctgctgaggtaaaaatataccagaaaaacctgtggcatacaaaatattctaaatgtgcttgtaatcattttccacacttgtttatttttttaatgcaaatcttagcagtataaagtggacacsccatatttaaggaagagcttgaatatcctgtctctttttgtgcttttagtcagagctctgcatatattttaagaaaaggcattgaggaactcaatcaaaccagtattcttttcacacaggtgaggctagagaggtctatttgtgtttgattataaaaaagcgaattgttctttagggttttatttttcccccttgttgctctcatgttattttccacccttattawtttgtggcttctccttccttgcctctaggttaaactttttgagtagaaattttcccttttattaacttttaatgaactacatagaatgcaaataatgattaatctacataaaatgtcaatgattgttgattgtggctcttgggctttgtaaagaatttactcttctattcacatatgtwcttttcctccatcactttgactttgacagattgctggtcaaaatgctctagataacaagaaataaaaatctgttcaaggcatgtttaattgggtaaaacaggcacaatctgttcagcattttttctatgaagcattaaaaattcattttttttcctattgtcttttattactgcaccttgttattactgttttttaactctttggggctacagatccctttacaatcaatcaactctctggaaaactgcaaatacataagactttttcgtatatgattccaagtktgctatggctgcctgtagcctttccaggggtgtgcgtccagtgaggaccactgcaaaactggaatagtgttttaaacttttttgaacatgactcaggaagaaatacattttacttgggatctagtgcaaacacatatttatataataagaaaaaaaagaatttttacctttactactccagatgtactgtgttctgttccattcactttttaaaaagatgccgatcgtgactcacaaaattgattttctgagccacatacgggttgcagaccacaggttaaaatgctactctagaattaaggtactccataactttagtgaaaaaagatatcctttcctttctgagaaaacccaaaagggttaaagtatttatgcaagattattcagcaatatgtaagtctacagtgtaagcgacaggtagatttatgtttatcatgtggacagtattctctgagggcagtcccctagagtgtacttgaggccactttctcagaaacagaaaagccagcagcaatttggagaagctcttctgggaaacctggagcttttatcttcagtgttataaagagaacatcttyccttataattaggcttgggtgtggatttcagctgtcatttatgggatartgaccccagacttgtcatagctgatacaacttcacatatatggtacttttaaatttagaaatagcttagcatcagcacttttataatattactttgttttttcctatatatggctattattttatcacttgctcttcgtttgtttttaagttttgtttttacttcctgagttgtaacataattttcatcttagtggctgcaaagtgttttcatttcagttgtgtagttccattaagtaccccattctatgcaatatttcagcacggtttaaagttatttttaaaaattaaaaaaaattatacatttttgtatagccagtataatgatatggattatatgctgtagttacttttagttttgattttaaaagcttgcaaatatagtangtatttggcaaaatcattctttatcctttccttccaggtttcatcagtttcacccttttctgtgtgcrgctgattttagaaagattgcttccttgtatggtagcgataagtttgatttgccctatgggatgagaacatcaggtcagtagtagtattcttacctggttctgttaaatttgagtggtgtttgatgagaatggcatgttaatataattttaagggcttttattctttctgcttcctaatgatttccaatggatatgattttgggatggaatgaaatgaattacattttaaaatataaattatcactccttttgaggcagtatagaaccaaaggataacaggggtagatttgttgttgttgagaaactactttttacatttgctctgccgccatgtgatccatgtaagttctggtgccttactttattctaatttagaattagcaggaaaacctgagggttagcttccttcctagcttcccatggcttctttttacctgtgagttttatctcatcagcgattcttatctccttaagcagtcttttaatttaaccagtggatattttatttttgttaagtttagagataattattccatcttctaatgataaaacactttcccttctgcttgttgataagtgattggccctatatagcattaagttctagatttttgagggatcataaaagcccaaggtgacaagccttcaacattgtgagtcatattttgcttattcaactgatcctgtgagggygggggttgtatttttttgttttattttttattttaaaactattttgcagagaatttgagaatttaattgggttaaacttactatttctattctaacatcaatttcagaatcatgtgctattttaaaattatatgattgtttttcagattaaatgtgttgttttttggggaggttttggaaagtgtctttagagcatttacgattttgaatgggcctgctgaagtagtgctggctaattgcagttgtatcattaatttttcacagaataaatcaatgtggccatgctggttggaaatgggtttgtgtgggagggagtaaggtggtttactaagtactaaaaagacatgattatccttttattcataacactccatttgttttctagcggaatattttcgacttgctctttcaaaactgcagagttgtgatctctttgatgagtttgacaagtgagtttatttccttgcttctagtctggcttttagcttcagctaagctggttcaaaatatgtaccccaagaaatgtaagatgtatttactcaggaaaatttcatagcgtttgtgcataaccaaaatttctagtagtaatttgacacttaaatacctataaaattaatttagacgctgcataactggttggctcaaaagtttgcagaatcttgatgatgatcaacactggtcccaaatcaggacatttttaacctacattcatttttttctaagttgttcctacttaagaattagttcaccccytgctaatcagctcatggcttccctttataggctgtttcccatacttttccatgcatcctccaaactactgatgagattctttctgtctcacttgttaaggagattattagattttggaagcagctctcttcttttttaatcagaattacatttgaaggacaaatatacttgctttgatgttttctgactacaaaagtaatttagtttttagacaattttgtcattaaataaccccatataaattgaattgccaaaaatagacttcttcactgttgggcttattttacagaggtaggtttatttcacaaagtttcaagccacactttagaatttggccagggtgccagtgtgataatatgggtagtctacagatgtaaggcctccattaaaaaggaaaatggcagaacttaccctcttgcccaagagaataggagtgctattttttgggtgcagagagtgrgggtagtggatagaggtctgaaagtgtagacagagtttgccataagagcagcrttagattttgtccaggtttatctcatttttctctgttggagaccaagatgcttgacgtgaagtgtgtatttgtgtaatgtgtattggttcatttcagttttttataacttcaaactatgccrtcaacctaatcaattttaattttgattgcatatcaatagcaaccataaattttttcaacccccaaatttatgtagctctgatttgtagaatattgttttttgcagacctttcacatatgtgctttatgttgattctctctaattctgtaagtttctggagaaactgaggctaggcacacagtttgttacacttggtaaatgccagacccaggatgtgaacctagatagttcaactccagtgcctggatgtctgagttaagagtaataaaggtggccgggtgctgtggctgatgcctgcaatcccccagcactttgggaagctgaggcgggcagatcgtgaggtcggagttcgagaccagcctggccaacatagtgaaacccagtctctactaaaaatacaaaaattagcctggcatgatggcgcatgcctgtagtcccagctacttgggaggctgaggcaggagaattgcttgaaccagggaggcggaggttgcagtgagccgagatccaccactgtactccagcttgggcgacagagcaagacttcgtctcaaaaaaaaaaaaaaaagataattgtgagtccttgcagcaattatctgcaaatatttgtaaagatgcttgactccatacatgcaagctactgtcaggattctggaggctatatgactagaagttttgttcttgactaatttttatctaagaactagactgtgctttatttagttgctttcataaccccttgtcccacaggtgttcatctgtttgtgtatgcctccatcaggctaatttttctcttcttgctgccttggtcttgctgtttcctgcccctttcctcctgtcaccagaatctccccactccccaccatcatgctaagttcatttcttagcattacstttcttgggagagaagtagagtgtagctggtgaggaggsattgaaaatcatgctgactgcaggagtcctttagtctgaagttgccaagagtctgaagtgaagtaaatgtatagtcagagactctagataaagartgaatggcaaataaccctgtaggatccccacagagggagcacagtgacacatgttttgtaacatcacagatgttcagttagcattgctgagttgtgtgttcgacctgggcaaaccttatcgagtatttcaaaaatagataagaatatatttatgacactattatcttctatttgcatagcacttttcagaggggttcacatgtagtattaaattttgcctatattttaagtgagtcattctacctttatcatgtgcccaatgtacaacacataggaaaaaaccaaccaggctgtgcctgagcaatacatttttagtaaactccagaaaggcagaatggactgaattgcctgaatgctgcctctgagtcaacttagttcctcaagtgaccttatgtagttctcatttctcttctcagcctgggaataaagctctagaagaaagatgtctgagaacagtctttctttctcaggcagagaatttagactgcctttggcaggagagtcctccctgagcccctggcttgtgaatttgtgagctgggcccacacgtccaaggaggaaggtattgatatttaggctggcttgtccttcatcatgggtctgtaggtcagagaggaggagctgaggtagaagggattactttcaagttactttcctcctttttctgctttctttactgatatttatataattgctggccttgctctctgctcattttttcctacctgtgctctagaaggtgctcgacgtagtttgagttataacagctaagcacattattttccttgctttttattctccttccatcctctttgtcccttctagaaagggtcagatgttgttggtgctgttgtttcaaatctgaatcctttaagattctaccagatataagttgtagttttgtcagatatctcgtccagcatgtatgatgccctcagttgggatagattccactgtgaatgggaaaactcaaaatatcagttgtgattgtaagaaggaagttctccatttgtccagttttcatgtaaatgaaytctgcaggtaaacttgccagggctggttctgtgagcatcagggaccaaggctgcttctctatcttgacgccaccattcctaaatatacaacttgttccttctggtctggtatgatggctggagttccaccgatcacgcctacctccctgccagccaggaggaggaaagggcgaagggcataccccaaccctttaagacatgccttcttcttaagggcatctcccagaaatcccatataacacttccttacctccaatgatgtgctggaaccagttggtaccaacttgtgagagctgtatctctttgtattcagctccatatttagtgccatcaaggtgaaagcttgaaatggccaaggtgagagtattcgtaccatgggaattggcaaacattacaaatcagggctttgcccattcatactcctccccctcccccagaactgattgttaaacattgactagcaaccactgtttgcatcccattggataggactccatcacaaggccacccctagctggaatgtggaccggaaaatgtagtttgtattccaggtgactgtgtgctcacctttaaaagcaaacatgattttaacagatgaaggaaacaagattattggggaacaaatagctgtctttaccaatattctgcatcatttccctggtccccatctgtttttatgcctggtcactttcaggattctgaagtcaaatatctgactctgctctctaacaactgagttcagtgcatcttttttatctgctgctgctactgatttctcatggacacaggctcttctctttattctccaaagcacagccaacataaggtgactaagtttaacaaacttcactgaagactgaggattttttaagagaattgcatcacagaaaaggaatactaaaaatatggccatattccaaggccctaatccttcctggctgtccatgtagctcctcagcaccagtctgccccctagtcctaaggattattgctttctcctcagtggaagtacatcctcacacagctagaaacagcagcaaccctaaatgatcaaatctcagctcccacttaaaatgcacagacaagctccccatccccaaccaccaacattccttctgaaagcatgccaagttttatgaagaatgctttagtcctgcagcacaggtggttatatagtaactagacataaatatcttacctractaaagcacctgtgtcaagtcagttgcctgctaaatggacaaggatttgtaaaagctgcctggttgctctctcaagcagcatccattatgtcagcatcagcaaagctgggttagattgactaccagccaggccaggagcatgtctttagaaaacttaaaaaagaattagacattagtggtgtatttattgaaaaagagtcctaactctaaacggaatatcaatatctgcctccctactttagacattctgctgttttgcagagtttctttacattgcaggatttttagcaaggagagcttgaggatgaggggaagttgcgattctacatcaacagagtgaatcatttgtggtgaatatgcagaagcagcccctgcctgctttctagcatcggctgtggtcagatgttgggtaaaggtatagaagtctcagtacttttgccaaaggaaatggtctcttccatcagagagtaacatacaagacctaagtgattcccttacttcacaaaagagcaaaccgagatcagagaggtcagattactacaccaaggtcctaagaggtgctaagcggaggagccagaactagcaaccaggtctccaactacagttccttgtgtagtttgaggatctcctggctgcaagtaatagtcttcactaggagtgatttaaactacgtggacatttattatctcctgtattgcgtagacatgtggattcaggtctgcatatttgtggttccagcttgcagtgtggggctgcttatggctgtacagactgtggattgcacaactccagggagtaccgattcattcatatagttatctgaatggtgctcccggacattggactgtgtacaacttgcacatatgtttggagtggccctggttgggggattgagttagtggctcagtgatgtcaaggctccagggtagtttttctgtggctgtctttttctctgatgtgtagctgctctaactttttgttatcacgtgtcaatgtctaagcagaaaggaagaagtgagtaatgaagtatcctgttcacatgattcttttggcagcagcaaaatctcttccaaaagcatctaatagacttccctaatatcttattgcccagggatgggtcacatggctatgtctagatgaaacattggcagagrcaatgagctcactattataggcttaggaaagcagggatctgctagcaaggcayrtggggtaatgggtgttgggaatgtgagtggtatgatttgccatagattgttacactgaaggtagagtcatgtattttaatgtacatgatggtattgaagggaaaatgcatgtcaaaaagcatttgtaaaataaaacacatcatagatcatttgaaatgggcaactcaagtttgcttgctctatattgattgtgtttaatgtttccctctgcataaggtaatgactcttccagcttttgcctgactttatgagaaacacagctttcacctgggggaagtgtaatctcttactaccactgctttagcagctttccagatttccattaacaggttccaaaacaattattttgttttctgggtaagcagtttagagcatacgcattttcctccgtgtttccagggtggttggaggagtaaaaagtaattccttctccaaacacaaagtagggaaataacctccatatacttaatgtaacaaccaaactgaattctaaaatgcacagcctgtgaatcaggaagtgttgtagatgggaggatacagagatataaatgatactattctttcctctagggactcacaatttactgcagctatttctacatgaaagttatgttaattaaatatgtgaagttttacagtcacccaaaggacactgaaagtcattgttccacacataaaaaggcagaggaagccagaatcacaagccaaatggatgaagtcaagragagaatgaatcagtcctttcagagtatggggtacttgctagagagtgagggaagcaatgagtaacgaggagtgcgattcagacagcttatctgtaccattccatacttcccagagccatggtggtactatgaatactagctgtagataaagtgttattgccaaagagtagtcctagggatgccctcaaaagagtttctatgtgattttcagaaaaatgcgtaaatctttgcaatatcctttaccaggargaaaagtggactttcattgataaggtttcctttcaaaagcattggcatgatttcctatagtaaaggcccttctctctttctgtttgtcccctataagctgacaggaaaaaaaagtagaatgaaactcctaaaaatatggtgacgtagagctgcaaagaatctttggaatgggcgttctaaatgaggcaatgtctatgttatttcttcctgttttttaaaagtccttgaactgctgggaccataagtaggagaggctgagtatgaggaattgccctgcagaagagatctgcctgaaaccstagacccctcttttttyttggcttatagggtatgtgggtggaggtccaggaccttgagtctgagtgatgaccagtgataatggcacatgtatatgacagatggtagctactcttaccatgatactctttgggccacgcattatctagggcttgatgaccatctgtaactcagtgtgatagagtggaaacttctgtgaacactaaggtctaagctatcagttcattgttgagcaatgttatataactgaccacgtctaagactgagctyagtcaatcccattactgggtatatacccaaaagattataaatcattatactatatagacattatactatatagactttatactacatgcacatgtatgtttrttgcagcactgttcacaatagcaaagacttggaaccaacccaaatgcccatcaatgatagattgaataaagaaaatgtgacacatagacaccawggaatactatgcagccataaaaaagaatgagttcatgtcctttgcagggacatggatgaagctggaaactatcattctcagcaaactaacacaggaacagaaaaccaaacacygcatgttctcaytcataagtgggaggtgaacaatgagaacacgtggacacaggaaggggaacatcacacactggggcctgtcgcagggttgggggctaggggagggatagcattaggagaaatacctaatgtagatgatgtgttgatgggtgcagcaaaccaccacggcacttgtatacttatgtaacaaacctgcacgttctgcacatgtatcccagaacttaaagtataaaaaaaaaaaaaaatagactgagctgagtaacctttctggggtcaacttcagatatttggcttgttgttcaggagtcttttgtagaggacaggggctctggtggtatgctggtggcttgttggcctttgcccctgcatgttccatgtaggtggagtcaggtagcccagtgtcagactgggaactccaggccmggatggatgcaggagcccctgaggcacctgggctcagggcgaggcagccccttttcttgacagaggattggcctacagccttcattgaatggagaggattagactagataccatctatagatattccccctctacccctatgcaggttatctcatgggaacagctgttatttcaatcttgtcttagccatgccttccccagtgcccagccttgcttaacattcctagtggagatggagccagctttaggaggtgtagcctctgatctgaattaaactgaccctgaggttatggaaagggcaagcaagctgggagtgtgagaatcgccccctcctatagcatattcatgggatgatttggggaggataatggcaataataccctgagaggaaagggttttgaatattcagcagctcccatctcagccatactacatggccccacagcagagagcctttgataaagttggctttctagaatagggattgaaatcaaacttgcttgtaaaagcatctagagttatgttactttcttatttagaaacagagagcccaggaccatgaggcttcygcctgctggacagcaaggacttccagtagcttctcagctgttttcccrgtcactttcagaagcaaggctgctatagctaattgatgtatgcaagatgtaattacagccattgatagggaaaatatcagcaatatgatgcccttggaagctcagaaaaaagtcaaaaggctgtaccatgactctcacaatagccagatctgaatataaaatctagtctcttctggtgatggagaaaaggaagtgtcatccatacaagatgaatttacactctgaaccccaggaggtcctgcacgtaggaagtgcctacaatccaagtaccatgctctttactgcctctcctgcttccagcactgtccctggggtcatccaaaccagtacagtaacccagctggcctctcttcttctgaaaacatctccaacttcaacaatactttgagataccatattgctggtatttcaaaaactgctgccagcagggaggaggccaatggcgtgtccatagatcatgttcagcctccaagtggtstcataatcaacaaagaatctgaagtttacaagatgcttcaggagaaacaggrgttgaatgaacccctgaaacagtctacctctttcctgattttgcaggaaatcctggagtctgagataaaaggggatctcaacaaccctcaggattcagaagtgttaaaactcctgaccctaagtggctgcatcaattggaaatgctcagaaggtgcccatgtgtgacaaatgtggtcctggcattgtaggcatgtttgtaaagctgcggggaccatcatcccctccctgaatgttacgtgtgcactgattgtgacactcacccgaaagagaagggcttttttttttttttttccatcaaatctactgtgaagagcatgcccaggagcaagtcacaccacttgagggtacgatgtgrtcatcatgttccccaagtgatccagcagacctgcactgaccaccgttctccagccagcctctgctgcagctagttctctaaatgttctggccttgtctcttgaaagttctgtacttattcccccaccccmcaacccgcttaccttggttttatccctgctcattgaaccttgagtcccttgtcttggttaactgactcacactgactgtgtggtgcccgcccacttttacaatgaatggcaaactgtttttgttcagtgtccccttgccggcaacactgtgtaccttcctcccctcagttcttctctgctgcaaatggacatcagccacatttgaaccaaatcaaatataatatgtctgacattgatttcatttttgctccatctatagactcccagaaaaaagaaataaaaaaaatgcaaagaaaatttaaatgaacaaacagacccttctggaacctactgtgacatgagatgtgtccacaaggcgaggtttcaggcacacactgaaggagcatctgctggacagccctccccrcccccaagtccttaccaacctgtgccactggtacttatttttcttgactgattaggtagacactgatttaggcakgactctttaatatttgagagcatagagcttccaattaaaatatgttaaaagtattttttaaattttaaaccttacaatcagatgaactgtactactcaaaaaaggtaaatttaatgaatataggagtgtgtacatcatctcctgtttacctgacaaagccaatgcttggctcttttaaacagtttccgaattctcacattctccatgtttctgggttctacagtgtttgtacagttttgctactcattgatttcctaaaatccttaaggtcttgagttcatctggtctgctgatttcacgggtcttagggaaacagtgttctctttagactttccatgccatgagggccctggaaggatagcctcaacaactttcccttctgtggttttgttccctagcgggcaaggacacagtctattttgtcatttctccaggcctgcctgggtgagggtaagagctgggagagagatggaccagcaacacgaagttcccctttgtgttctactttaaagctgtttgccaggaacaccgcgtgaacttttagtttgtattggttaagctccaaggaccagtccatgtttgagaaattgaagtgagcatgggcagggtacagaaaactgcacttttctcaccagattccaaactgtccatctccacacttgtgcagcagagagccagaggtagaatcttcgaggagtgggtaatgctggcaaagaatgtagacctgcataatgtaaaacacaaatgcagagtcctatatggaggtgtgtttcacagtctcaagttctggatccacatgctagttccactttggagtatgactttaaaatgttacataatagatttctgaacctctttcttcatttgtatactgggaatatcaggcttacttatctcaataggtgggtatgagaatcaaatgagagaacatgtatgggctgataatagttgctgacaatgatatgctcttcctatagaatgttactcattgaatcttgtatctttttaatacagctctagacttgtaagtcgcagttggttctttttctacttgygcaacaagtggaatttggcactgggtttctgacagtatgcatggattcttggaatcagttttgtaaaagatggctcaatctctcacttgtccntctgtccaacagcataccctgtaaaaagtgtgtggtggttggtaatggaggagttttgaagaataagacattaggagaaaaaatcgactcctatgatgtaataataaggtaaatatattttctatttgctaccctagaattgtttcaaaagaatatggtttcttrccttaatacagctgtgttttgacaggaaggggagatgtttccatttggttttttttttattgcacaaccttctctcttggttgttggctagagttagacctagatttcaggttactcatttagcaagtatttgttaagtctccttagtgtgctagcatgcttctagccacaggagagatagcaatggataagaacaatgtttgtgctccctgtggagggaagaaaatgagtaattaaatatataaaaataataaatgccatacataatttaaaaaggatataacagagaatctttgaatggctcctttgtaatgattgaccactttgagaaagagacatctaagcagggcccaagtgaccacacagcaacagccatatgaagattatggtagagcagtccaggcagaaaggatgtttgctgcagggcctcaggaggagatgatcctgagtttgagaggagtagcaaagaaacccagtgaagctggaragtagcaggcagggggagagtggtggaattggaagctgaagcggtgagcaaagatcaggctgcataggactttgtaagctaggattagaaacttggattttaagtgcaacaggaagctttttaagggttttaagcaagagaacaaagcagtctggttatgtcttaaatattctggctgtggcatggacaatggaatgtgrgggacaagggtggaaatgaagaggccaattaggttgctgtattcgggtwtaatatgatggtggcttgggacaggattgttgtaggagaggaagagatatgtggactgactgaagatgtgttttagacatagagttatcgggatttgttgccrtattagatgtgaagagtaatgagaataaagaaatcaaggatgcctcctactctgttttcagcttaggagattggctggagagtgktatcatttattaagttgggraagactggtataggagcaggtttagaggaaaaccatgatatgaacatgttagatttgagatgcttgttagatttgcagtgggtwtgtcgagtaggcagttggataaacaggttaaaatcttgatggtgtgtggcctataagctgtatttaaaccatggactgggtgagatttcccaaggagagactgagagagagagaagagagtgaggactgagcctcagagaactcaaaatttagaggttgagcaaagaaaaaggaatgtgtaaaagagatgaagaggatccaccagtgaggtaagaagaaaatcgggagaaggtgatcacagaagccaagagagcaaagtgttccaggacagaaggagtgaccaactgtatcccagtgctggtgagaggtcatgcaagataaggacagagtggtgaccattggactggtgacctgaggctcattgacactcccaataaaagcaggcttagaggcgtgatgtggcaagaagcccggctggactaggtcgaagagggaatgcagagaatgtacacctgaatgtacagatgaagatgtagagaaaccaatgtagtccagggattttgcttcaaagaggagttgagaaatcagatggcagttagagatggttatgcaatcagggttttttttttktttgttttcttcttttgaaaagattggaggcactatagtacattggttaactggtggaaatgagaaagagattggggtggtaaaagagaggggaagggggttcagaacacaagtgtggttaatgtttcataatggaaaggagagccaggattgtggttacaactaccaagagtccctctgatgtagtgaggggaaaatacggacctttctatctctatttttttagtgaaaggtcaagataaggtcatcatctgggataagtgtgtgtgtgtgtgtgtgtgtgtgttaggagtagctatgaatagtttaaagaatggcaaagttagcatactgaggcaatacattaggatggtttggcagctttgggggttttgtggggttacaagctgcctagggtttctgcatggtgaggtcaccttattttctgtttactatccattttgaggaagctgtgataatttacctacaaaacaattttgaagcaatcacaggtttctctacccataattgtctaaatctgataatttagagccacaggaaacccttgcaggaaaatatcatgggtrcaacattttgaaagtcatctcaagtgttaataagtctgttcgtcttatattacgtagagtcagtagcaaagggcaaaacagtatttatctctttggggacactgttttggaaacaaagcatttctttttttatagcatggcttcataatgtgtgcataaatagtgcatgtccaaccttggctttcagcatacacaaacccaacagtagatcctttgtggttctttagtttactctagcaatagacattcatttggttgtgcttgaatataatatagcagatttatattgttaaccttatttcagagtacaacaattttgatgggtctttaaaccaacttaaatgtgattcttcttacctgtcagtcacacacatccatgtgctacatgmctgtgtggctttgagcaagtaattttctctccaggggtttgtcctccaagttctctttcaactctggtatcctgtggctctgtgttcccacttttttaaatttagtcttcagttcccctggaggtaagactgaattatcattggctccacaattaattttcaaatacaaatgaacatttctgcctttgatcaaccaactrtttcatgaaaaggaatgatctccttggccattatgtgtgaaagattgatctattgctttgtggcttcagagcacaggataaaaggctgatgtttgtccaactctgaaacctctgagaactgtgatgggaatggcagatactgcacttggtctacatatcttgwatgttttactatccacagaatgaataatggtcctgttttaggacatgaagaagaagttgggagaaggacaaccttccgacttttttatccagaatctgttttttcagatcctattcacaatgaccctaatacgacagtgattctcactgcttttaagccacatgatttaaggtggctgttggaattgttgatgggtgacaaaatagtaagtaggcaaaattgttctgccttcagattacctttagtgctttttttccttaaaaaacagacagmcacactgttctattctctatattttttactttcagaacactaatggtttttggaagaaaccagccttaaacctgatttataaaccttatcaaatccgaatattagatcctttcattatcagaacagcagcttatgaactgcttcattttccaaaagtgtttcccaaaaatcaggtatgtatttatctctgcatggtttcaaactacagatctggctgaggtaggatagagggtcctgggaactctcagaaactgtatgagaaccacagctcatgagatgatttctgagggccatctctgagttagtaaaagtagttatctatggatattatctttatgtttttcatttatgttgcaaggaaatgtaattttaagttgggtttttttcctgcccttgtagggccttcctggggtctctttgtgcatgccgaaacaatttatctttcataactctgtcttcagtgttctgcagtgaggagagtctgactgggtgggctgacgggcaggcttgtgctcagagtagctggcctggcttcaggccaagtgcatggctttgcaggctaaaaagaagtgtctgagatgctctgataaaaatatcacaggaaagccagaggaaaggtgaggaaggacaataaagtagtccagaaacatttctgtggtcagaggaaatgttggcattaaattctcaagaaatggtagctacagcaatattgaaagagttcttgaaacttcaaaatgaaatctcattgactttcactcctgtttgccttctttccctagaaaacaatactctagacccatacagtggcagagatattttttactggaagcttgagtaactgtataacatgacaccttggttgaaatgagtttttcacccctttttaaagtagggaaaaatccaaagaaataaatatacatcatgtattttcatgatgtatatttagcatgataagaattgtgattaagaaattcaaaagtgttatatgctgaaaacaaatgttagtgttgcacactgaaataaaggaatattaaaaatcaaaaaggaagtcaccagtctattctcttccctctacaacccatgtaacctctcaagcttttctaccttttatgtgcttccagactatttgctatgcattcataaacacataatctttttgtttgttcagtataattatgattataccataggtattgttgttattttcttttttctctttatttaactcttcccctatttatagacactcagatatatccaacattttcttctctttaaataatatagcagtacatgtgtttataggggttttctgcccatttgtcggatttctgtaggatggacttctggaagtggaatgctcaagtcaaaaagcatacatgttttaaatttaaacctgacttcctagtaattttgagggtaaaggacagcttctgaatgtgtgttttgtgagttttcacttcctatattcctaagtgaagtatgatcaggtatatctcttgcttcttcattttaggtaatatctttaattccaaaagcacaggaagaccctgagcatacttagtgatgacattagaactagctgtagctacatcaaagtcccagtaggacatggtgtcccagaaatcaaatgctgtatttcaagagaagtcagccatgtcagatgctgtccagaggttgaatgtaaataataaaccctggttttagaaacgtggaggtcatattggtgatatatattaacaagaaagaaggaaaaagcctgcttgaattgggttgaagagaacctgggacatgagcaagcagcaacaaatctttagtggactttttgctagaacaaggatcgtagaaatgaagcaatagttggaagatgatataggatcgaagaagcgtgttttatttttggtctgtgtatatgctgaagggaatggttcagcagaaagaaacactgatgatgaggggagaaagtagttaagtacagaagtaaaattgttgagaagtgatatgggataaaatatacactagtgaaaagttgctgaagttacatctcatccattataagaggaataagcactgcaaatgtgagtaaagatacaggtaagatggtagatttggagttgggatgatgaagccactcttttgactgcttttgtttccttaaaaaaataaagattaactagtcaaattaggaagaagactagggctgttgcaggatacaaagttataaattctcatcttggagagtaggaatggaaatttactagtcaaacgtaactggattgctaggcaatacttactgcctgtttgagagttgggtcataaattcaacattcaaccaggtaaacgtatttttctcttgccctattctgttgctggggtgtgggtacagggtgactgcagtgcttattcctcttataagagtttgtcaggtggtaatataggttctgtgggtgatrgctgcagaagagctggtctatataaaggaatggttataaagacggatgaaggactcttaagatgtgaagaaaggaagtagaagacatgaaaaggggcaaggagaagraaaaagcaatgggatcaatgaggctgaatgactcctaggttacaatggtacataggataaagaaaattttatgctgaaggcagttaatgctttcggacaagtttgcctcctggaattgatttggttgtgcttcttcgatttttttttcttttcctcaaaatcatagtaagtcatatgtaatttcaatgggaactataagaaacactttattgaaagtgttatgtaaaaagcttaagatgtatcttgtttttcgctttgaaggccatctcagtgagaattacaatttctgaaagccaagaccctcttgtcaaatatctatcacactggttttcaagatatatgtaagataaggaaagaggatgcttggtttttctttctaaaagtataatggtgcrgctgagattgtgatattgctatgtatgcatttggaatatttattttctagtcagatactgttacaatttatcattgaagtactagattagcctttccctagagttagtttaaatggtgagtataaaatatagctattcgaaggcgaatttatatgaagtcttttatcatgattccatccgtttgtgaatgaagctgtccttatatttcatacacgtgttcaaaattcccaggctttgcttttgccataaggagcctgactcatcatgtttttgtrttttttaaaacaatacagcaacattctcttccttaagcctcacagtattctttcattggatagttgtcctctgggctaataccacagctatattttattttaaagacttcctaagatttcaatcacagtttatatattttttagagttaaggtatatatgcatactctttggggcttgagccttataatgagagtttagttatttctctccttattaaatgtttagaaatccctgttttatatgattcagccaaccaaatatgctttggtaacaagtagctccttttgcttaaaaaagtttttttcatcccctcccccagaaacctaaacacccaacaacaggaattattgccatcacattggcgttttacatatgtcacgaagttcacctagctggttttaaatacaacttttctgacctcaagagtcctttgcactactatgggaatgccaccatgtctttgatgaataaggtaatatactgtactttaggtaatatacatatgctttggactaatctttgagggatggaaagcccatattttctcttctcacactcattttactgagggaccacgttttgaagggttgagggcttgatggtgattacagggctaccaagggctgtaactagaactcatgtccaggatcattttactacagcatgaaatcccaatttatgggcctcatggttattgccaagtgtcatcaaacccatataagtacagaaccttactttagatattatatttgcactattgaaattcaggcaacctgctgtgtttgagatattacaaattcaccttgcattgctgtgcttaattattctcatttgtttttaagtagacaagatggtgtagaatattttaaccctacaagagaatcttcatgatcaaaaaggttaccaactttcatactggatcacacttctcttgaatagggattaatagtgaggatttgtattttattttttttaacaattttagtttaaattttttttttttttttgagagtctcactctgtcacccaggctggagtgcactggcatgatctcggcttactgcaacctgcaccccgcaggttgaagtgattctcctgcttcagtctccctagtttctgggataacaggcgcccgccaccacgaccggctaatttttttttttttttttgtatttttgtagagatgagtttttgccatgttggccaggctggtctcgaactcctggcctcatgtgatctgcccgccttagcctcccagagtgctgggattacaggcatgggccactgtgcctggctaaggatttgtaatttacttgactgggaaggagtttcctagttttgtaattctaacttaaattagtagtgcatcacaagtgatgggattaaaatgttatctgtatacttttaatattgaaatattacttgataaaaagtatatggatatatctcatgaaatcagtccccttgaatcaccccactatataagctgagaaagtggtataaatcaggttagatttagtattgtcttttgtccctcacccccaccctctgtccccaccaggtaagacaagcacttaagtatttcaagaatgaggtaccccaacagactttggattaggctgatttctcctccgccctaaactttcctgtagcacttgtggtatttcaagtgtcatctaaagagcagaatattaaaacaacttcctcaggaagaaaacttggatattcatgtatagaacagtaatttttaacacatcttaaactgaaccaggcattataatagtttatctccaggctgattttgtttgtttttaaactgatktctaggggcttcttccattaaagtgaacaactcaaaattttggtctccagatttgtattgtaccatgattcggtctaccagggtttgatatgaaggagtcttacttatgtgagagttgaaatggaaagagtgggctgtagggaaagcttttgcacaagaaccagcaaggaaagtaatttaaaaggctatcaaaagttaaaagtacatgcaactcgttacttaacattcragttctttattcggatttttttagatataaagtactccattggtgctgctaatactttgagattgggaaagaatgatggtaattgtatttttcttctttagaacgcgtatcacaatgtgactrcagagcagctctttttgaaggacattatagaaaaaaacctcgtaatcaacttgactcaagattgactctrcagactcagaagatgatgctaacagtgttagttttatttttgtactgcaatttttagtttaaaatatgttggatgcactcgtcaaataattatgtatactgtctgttgctgcctggtgattcataaccaccagcttaatttctgtgaatactgtatatttaacttatgaaaaccaagaaatgtaaagataacaggaaaataagttttgattgcawtgtttttaaaataagctagttttctgaggtgttttcacacgtctttttatagttacttcatcttagatttttgaagggatatgacttcctactaaggatttartttaccacaacaattctgactacaataagacattttgaggaggatatttggctactgtaaacatggctggtggaraatcacgattgtggcttgatgtggcaagccgaaaccacttggctctggaaatctaagttcatactggtttaattaagctctctcctgacaacccccagaattaaatgaaccatgattgtgaagagtaatttggtacaatgaaggcagtgtttgtttttaagttaaaggaaatgggctaaacataaagttcttattagataagtaaataactaaagaaagaatacaattactaaactctgatggctttgtattattttaaagaaatgaagtttaahtttatacartgaagctaagctaggcaagctcaagaaggaaaaaaaaatcttgaacattatttttttttgcctgacttacttattcattaaattttgaaggttttccacttgaagtaaattaggaaaggtaaagaagataacagaacaagtaaacacttaagaaaagtcaagctgaggccgggcagggtggctcacacctgtaatcctaacaaacactttgggaggccgagggaggcagctggattgcctgaactcaggagttcaagaccagcctggccaacatggtgaaacctcatctctactaaaatacaaaataattagctgggcgtggtggtatgcgctgtagtcccaggtactcgggaggctgaggcacgagaattgcttgagcccgggaggcagaggttgcagtgagccaagatcgcgccactgcacttcagcctgggtgacagagtgaggctgtcttctaaaaaatataaaaagtgaagttgggatttttggatttaaatggtacaaaaagaatatctcattttcccatgattaaagctaatcttcagatggaaagcttgcctggctacctagggtgcaccagagaatctgatccaatgcaagccagtcaatcctacaaatgtggtgagctagtcttccttcctatattttaataaatgtaaccaaaggccatctggaggtaggggaatgagaggtgaagaaacagaaaaatagaggttataaggatggaactaaaagttgtcagaagaggtatgasctgaagaaagaattactctcttttgaccaataaatacaattgggaaacactggaaaaccatggcttgattactgacaaccaacctgcctctctaaagagggtgtataaagggtgaaatacattagatttggctcagaaacagaatgcggtacttataaagcagaataaaggggagaacagtagtagttgatctaacccagattagacatgaataccagcatatgtttgcagagtcccacagttttgattcytcttataactttttgaggtgcaaaaggaaggtaccagaactggaatcacatgtaatcaatcagtgtgattttcccctcataccacacagccataggctgcagtgtggctgctgaagttcaattgatataaagtaaatcaggcttcaaaaagaatggtgctgtgggtacacaaggacataaagatgggaacgatagacactgaggactgcggcggggggagcgaggggagcggggagggcaagggctgaaagactatgtattgggtactatgctcacaacctggatgatgggatcattcataccacaaacctcagtatcacacaatatacccatgtaacaacctgcactctgcacatgtacccttagaatctaaaataaaagttgaaattatttttttaaaaaaaggatggcgctggtcatagaaaaagtcaaagtaaactaacagtgtcattttcaaatgttgctggaagcacaatattggccataaattagtgaggttaaaatagaagaatctggcattttatagtataaggaaaagctacaaacctcaaggttgttttatttaaaccaaataatctgagcaagacatatatacattaaaaacaaatgaacacattaaaatttcactattttacaatctaaattctagcaacatatacaaatactgagtgactacagtacatgccgaggtaagataagtacattctgggagaatatcactgacgctcaaaccatttttatttccaatatgtatttcaatacatgtttgtttccacttttcccagtgccacacacacacacamaaaaacaaaacaaaacaaaaaaaaacagtcacaagttggattacattagaattggtgccacagttractttaaaagcattttaataaccacccaactcttagattttgcagtttagggacttcaagttcagaaccaaaaagcagagaatcgtttcatgtgacatgatgtttctatagacctcttgctctctaggtgacaatgcagagccagggcaaaggtgtttaagctttgtcaccttccacagctttgtggccacattcatatttagataagctcggactctgctcccctcttctggagatggggagaggcaagtgtgtatgtgttgtcatacttactgcattaattcttcactcgaaccgtttacatcagcgaataaacccattgttcaatgcaaagtgcaaacagtgaaacatgaacttaaataaactggactagacccatcacatccaacaggatctatttagatttayagcatttaataaagtataagtcagaattcacaatatcttaaactgtgctgtttcctaagatcaagtaacagccaagtcagtgtaattttatgaaacctgtaatggccacatttgttgtgtctccgatgtatttctataattgcattaacaggaaaaaacttaatccaatataccagtgactttgagtcttaaatgttgcaagcaaaggataaaaattcaagggaattttgtcagatatggttactttcacattttcagttgttacttgattgtctccaaagccgtatatgtatcagacatataaatgtagtaaaaaaaaaaaaaaaaaatagaaaacctctactataaaaaccaatgaactaaaaagaagtataaagcagaaaaaccatttgaatcasgctcagctcttcatctggaaagtaaagtttatataaaagtagtaaaaactagatattttataaaaattattggtagttcaaggatagcacagtggcaatatgaatcgagtcttaaaatatgcatcatttcagaaaacacttgcccctcttaaaaaaaaaaaaacccaaaactaaacaacaacaacaaaaacctccaggaaaaaacaatcaggtatacacaattaacacaagaatagcaaacttctttgggaaaatgaaatagttaccaaaaacatctctcttaaagcttcaaacaggtatattacttgaggaaaagtatattctctgtgtactaaggatgaattaaaaaatcaactggtttgctctcttcccacctgaaaagggatgactgcattaatatatgtgctttccacatccatatatgttttaataaaagtctaccatctatgtcttttgtttcaaacattttgaaacaaaatatgtattgattcttcaatgaatgaaatcacgcctcaaagtttggagaaggaaaagccagtgaaaataaggccaaaaaaccataccacaaaaggacaggaagcctgcagaaataaacagttctctttctgaagcgatgttttagaatactgatataattcatggaaacaagaaaacaaatactgttcatctttattcaaattgagtgaattctggcaacatcataatctggtggctcaggccaacagaagtgactagaactttatggaaaagtactgttcaacattaaatctacaaacaaaggtttatggaagagggaatgtcaaatttatgtatttttatcatatggtgagctgctcatgtcgtcttgacagtctgaaggctttaaaagatggttttacattgttagctaataaattacagatgatttctattttgccatgtctaaaactagctctgggcaggtatgaacaagtggtgacatggaagctgccaggaggtatcaaaaacaaggcatgaatattcatttgctaggaagctataatgtctgttccctaggtgacatataggactactcaaacctcttaccacacaaagtgcacgatcacgcagtcctgaaaaatacacgttaggtttatattttgtgtaacagtttatggaaaactgaaatgaaaaattattttttctgactaaaaatataaaataccttgagactcaagaaaaatgtatatgtttgtgaatgtataaaaccaaaaaggacaaattctggttactttttaaagaggtaatttatattacttctgagtgaataattttgcctttcactgtgataaatataagtgggtcatgtttacagtattcccttagaagccttcaacttttcataactctcctaggaaaaatcccattgcaaataaagttgggggtgggagaagaatctcctttaaagctttcaaatcataaagttgttcctgtttacacattgaggagcatacttaaaggacatgaagggatctgaattcatgagactaaggcaagcatcactcatcagaaatactcaaacattttataaacacaagaatggggcaagacaccaaagggcctcaagtggaacacgcaagratgagaccaggccatatactgtgaagcattaaagctctaaagagtgtcacaaagtgaaaaagcaatccccctgctcattacaagtcagaaaatcccagctacagatcttaagatggataagtggatatggctgcaataaaaacaatgcttatatcactaattattaaaaaaaatccagaaaagaatataggaatagaagaggaaatcatgatagtacccatctttcacaaacagactagaatttcaagccattaggtatttcaagaacagtaccrtgcgttattgccagtcaggcttacagagccatctcgagttcattaatgtacctgcagcattggtaataaatactctgtgatttttaatttctctgaagtgcattatagggagctttttctgtattaaaaatagtgttctacagtagtatcaaacaggacatttgaaatttaacaggcgagcagtaactgtgccaccataacaccttaaagcaagatggcaagattagtagtttcctgtacctcagtcaccacattttccccaaccacttcagtgacagttatgtaatacattctatatattactaccactaataattaaaaaaaaaaaggccatgtgctttaaaacgatgctttgtaaaaagcagcatcatcttcaaaggatttctttaaaaacatcacattccccatcccttcctgctcctgatacttcttgtgtgctctgtggcacctggtacaccaattcgtctggggcaggtagacctggcttcccagctttcggggtatcatactgggcctgggctgaggagcagctgtcagtcctggagagaagtgtattgtaagttcccactagtgggggaggttggttccccgtagccttgaaagtggatgtggagggctgaccaactgaagttgtggggtgccctgacatgtccatgatgattggggttgcatactcaggccccgtaattgggagtggttcagcataggcatgataaacttcctgccctggtgagttgtaaggatctaggtctgcatagcctgcttcttttccttcttctggtttaaaggtagatctttgatgaagtgtaccaacaattcctcctaccagtggctgagcatactctgtggatatcacaaaacaacagaaaagtcattttactagtaaagagattgcataatttagggtggcagctgcagattatactaaaagcaaacattctttaggatacttttgttgccatcaatacttaatctgtaagaactttgaaaattaaaattaaacatactgtctagtacttctcatagtaataatataccagaaagtctcattcatgtaattttgcatatagaattttcacatatgttctttagatttacagacaacatatttctttactgaatatttcctttctgaattattttcagaatatttcattggaaaagaaacattcagttactggaataaatattaatcttgaaaaataatttcagagatttttttcaaatattaggaaatgtttaaaataagtatgtactaggctaagaggataaacactgtaaggcttcttctgtctttcccgctctcctctcaacatctcgggtctccccacaagcctcagttaacatacataatgcccagagtctttagaaatcaatgtcccaactttacagacagaatatccaagatacagaaatgactctctgaagagtcaccttttaaaaaagtggttctacctttaggaaacaattcatttcttaaacatgaaagggatcaaagaactgtaaatcccaaagcactttatagcaagcctaagcagtttctccctctgcctggtaccagaaggctgcaacatagttacctgcagagtcagcctgcagcactgtggtgacttctcttggactcaggtgattaacttcrctgctgctatagcgaactggggtttcctcatggtccactgcttttgcaggaagaaactgcttcattcctttccaccaaccttcattgtgacggcaagccaaagagaccattaaataaaaacctgtatctcaaacagtagtatcaagagaaaaatcctgttgcatttaagccatttctataacaaatatctctacaaacttgcctttataatccaacttttttttttttttttgctgtgatagactatccagcaccaagcagtacatggtagaaatctctatcaaacacatgcaggcaaatcactgttagtatagtacagccagatacagtatctattttaggggtggccttaattacatttttcccaaaaaatattttccaagatctaccctggggcactagctgcccttttctatcctagccacagcagtgaactctcctggctcctaagagctgatccagtagtgagactgggaagtgagaaactggtaggggggcccctttggtgtcacttgcagcaattcagaagatgacaactcatcatgggagacctcccgattcctaaactgctggactccacttggtgaataaccatggcagaggacaaacacacactgtgtcctggagaccacagtcttttgtttcttactcagtgttcacgtgggccacagaaagccggtctcctcatgagaaacagatacacaggacaaactacacaagttttccagaagaaaaagaacagagcttgttttaagaaatttgtacttttcatttcattacttaggaattacaagagactttgcagaagggtaaaaatggtgagaactgaagagtaatgccattgttctaacagtgtcggggagttcacctgggccagagaatgactcttttttcactactgccccctgtaggggagcgacatccctctgatagaaatgagatgcaaagaccacgtgagttacctgcccggtcccagtaaggtaagtcataggtgccttcagtttttttctttctggaaaaatacagaagagaagttagcaaacagagtaaattcactggtaagcctgctccccctaccccatgacaggccttggtatgtgatattccccttcctgtgtccaagtgttctcattgttcaattcccacctatgagtgagaacatgcggtgtttggttttttgtccttgggacagtttgctgagaatgatggtttccagcttcatccatgtcactacaaaggacaggaactcatcattttttatggctgcatagtattccatggtgtatatgtgccacattttcttaattcaatctatcattcatggacatttgggttggttccaagtctttgctattttgaatagtgctgcaatgaacatacgtgtgcatgtgtctctatagcagcatgatttataatcctttgggtatatacccagtaatgggatggctgggtcaaatggtatttctagttctagatccctgaggaatcaccacactgtcttccacaatggttgaactaggttacagtcctaccaacagtgtaaaaatgttcctatttctccacatcctctccagcacctgttgtttcctgactttttaatgatcaccattctaactggtgtgagatggtatctcattgtggttttgatttgcatttctctgatggccagtgatgatgagcattttttcatgtgtttgttggctgcataaatgtcttcttttgagaagtgtctgttcatatctttcgcccacttgttgatggggttgtttttttttcttgtaaatttgtttgagttctttgtagattctggatattagccctttgtcagatgagtagattgcaaaaattttctcccattctgtaggttgcctgctcactttgatggtagtttcttttgctgtgcagaagctgtttagtttaattagatcccatttgtcaattctggcttttgttgccattgtttttggtgttttagacatgaagtccatgtctgtgtcctgaatggtattgcctaggttttcttctagggtttttatggttttaggtctaacatttaagtctttaatccatcttgaattaatttttgtataaggtgtaaggaagggatccagtttcagctttctacatatggctagccagttttcccagcaccatttattaaatagggaatcctttccccagttcttgtttttgtcaggtttgtcaaagatcagatggttgtagatgtgtggtattatttctgagggctctgttctgttccattggtctatatctctgttttggtcccagtatcatgctgttttggttactgtagccttgtagtatagtttgaagtcaggtaacgtgatgcctccagctttgttcttttggcttaggattgtcttggcaatgtgggctcttttttggttctatatgaactttaaagtagttttttccaattttgtgaagaaagtcattggtagcttgatggggatggcattgatctataaattaccttgggcagtatggccattttcacgatattgattcttccta

SEQ ID NO: 94244 - DNA, 23757 bp, Homo sapiens
gctaaggtcccttcttgttcagatcagaagatattgacaaattattcaagtgaataaaaaaactataggtctatatgtgttttcagattcaagggtaaccaccggtagaataacaacaggagtccaaatcatcaagcaaaaagaacaaacaaaaaatgatcaatccgaacatagggaaaggaaacacacatacacacatacatatacatacatacacacatgcacacacacacatgcacacacatacacacgcatacacacacacatacattcacatcgtaacagccaaatttagtaatcgtgataaatatgaccgtttaattctataaaaaggaaaaactttccgtttatgtcaaagctatagaatgtttacaggacacctatcaagaacaaaaataacataaagatactttaaatattatgatgagcagagatagaccagggaaatactacgaaaagcaaacacatgtagcaacagttatcaggggagtcaaaaagatgtttatataacagtaaaagatacaattagaagattaattgccaattttaatacatattaacatatctgagtagatttttaaaataaaagataatgtaataaaacacgattctagtcagagaaatcaaggcaccttacctagaaatgacaagaccacatagatcttttctaaaggcgacttttttttttttttgagacgggagtctcgctctgtcacccaggctgtactgcagtggtgagatcttggctcactgcaagctctgcctcccgggttcacgccattctcctgcctcagcctcccgagtagctgggactacaggcgcccgccacttttttgtacttttagtagagagggggtttcaccgtgttagccaggatagtctcgatctcctgacctcatgatccgcccgccttggcatcccaaagtgctgggattacaggcgtgagccaccgtgctcggccataatggtgacttttaaattaaaaataattgatggggaaggtcttttagaaaacattgtctaaattccaaaggccataaaggaaaagtctgaaaagtttaactgtataaaaatctaattttctacatgggaaatcaaacaagagactgggaggaacttccaaaccatcaaacatgaaaacaactactatttatttgatagacaaagagtccttaaaatctgagaggaaatatgtaaaatcccaatatgaaaagggaaggaattgtttcattaaaaaagaaattcaaataaataatcagtagatgaaaagatgctctacttctttattgaccagagaaatgcaaattaaagtaatgacatatgaattttcagttatcggtgactggcagtatctagtgttggagcagatgtgtagaaattggctctcccatcctactgtggggggttttaagtgtttcaaccttttgaggaagcagttttatatacctattaacattgtaaatccacatatccagtgacctaaccgtcccactcccacaaaactgacttacagagataggtgcatgtctgaacaaagatacatctacagggcaccattgtggcaccttttgtaacataaatagttggggaaaccatttgaattgttcatcaactcaaaatagacaaattgtgaaatacaaaatgtagtgtgtgtgtgtatgtttatataaattgtttttgaagtttggaagaatacacagaatacttacaaccatagtatggtacacactattgattagtaatcaatcccattcctaattcccttaatattttgacacattcacttaaaaagtctttccactttccagcccctcttgcacagaggagtggtgacattctaaccaagaattaaaaaaatctcagattttctggaagtttcttggaaagctctcattttcctgataaataggatagacaagagaagcacttctagaatggcaggataagaagctctgaaaatctgttcctccagaactgcaatgtgaacaccagctaaagtgttgaaaaatgaatggagcctcagagacctttgggacatcatcaagggtatctaacaggtacaatgggaatcacagaaagagagaaaataaggggacaaaaatactatttgaagaaataatgggtgtaaattccccaaatttgatgaaaaagatccatctacatatccaaaagcttaataaatgaatattcatttattgtcatttattcatttattctcaaaatrgaataaatgaaaggagagccatacctgcacacactgtagtcaaacaatcaaagggaaactgggagtcctggaagcagcaagagtgagatgagtcgtcaggtaaatcagccctcgataaaatagcaggaacctgttcacccaaaactgaaatgagtcgtcaggtaaatcagcccttgataaaacagcaggaacctgttcacccaaaaccaaaatgagttgtcaggtaaatcagaccttgataaaatagcagcgcctgttcacccgaaaccgaaatgagtcatcaggtaaatcagccctggataaaatagcaggaacctgttccgccgaaaccaaatgagtcgtcaggtaaatcagcccttgataaaataacagcacttgttgaccagaagccatgggaccagcaggcagtgagatgacacagtcagggcactgaagaaaaacactgctaaccaagaattctatatccagaaaacattcttccaaaaagagagaagtattacagctctttagaatttgtctagcaggttttctggtaccctcccccattaatttattaattaaaatttaaaatatgtcagccttttggctaagatcaaatgtcaaaaagaaagagaaattaagacattcttggataaacaacaccgagagaattcacaagcctgtcataagaaatactaaaggaagtctcttgggtcaaagtcaaagaacactagtaactcaaatgcacattatacacagaattaaagtaagtgccaaaaagtattttagtaggtacaaaattaaaactgcaaataataaaaagagaattagcagaatctttccttctcaatggggtttaaaatatggaagctgcctttgtagggtgaatttgggactcgcagtttccacttcacccacttttgtgttgtttgcattcgttaaaaggagatattttacttccccaattaaaattatctttctaatctttataaacaattatttaattccagtaaatcttctctatattgctttactagtgagttctattaaaattttgaagcacagaaaattcccctacagtataaagtatccccagtcacagagaagacaggggttttgcaatgatttctagaatagtgcaatttttatgcaagaacctaatataacacaaaaattatagcccgattttatttgtgggtatagatgcaaaattactaaaaatactattaacaagttgaatccttagggtgttaaaagagtatcactccatgaacgagttggttgtgatgtggaactatgaggtacttttatgatacaatataaaaatttatggtaattttatggtacattgtgagacagtgttttcttctagcatcatactagcaggtctatggagaaaaatcacaggattgtctcaatcaaaaaaagatttcattaacccaactctcatccctgataaacactgttagttatctagagaaagaagaaaattgtcccaatacagtcacctctttgccacacccagccaacagcagacgtgatggaagcctgaagaacaccctgccacgggcacaggcagaggcacaggcaccctgtcgtcctgattatttcaccttgtcacgggcagaggcacaggcaccctgtcgtcctgattatttcaccttgtcacggacagaggcacaggcaccctgtcgtcctgattatttcaccttgtcacaggcacaggcaccctgtcgtcctgattatttcaccttgtcacaggcacaggcactctgtcgtcctgattatttcaccttgtcacgggcagaggcacaggcactctgtcatcctgattatttcaccttgtcctagagtgtcctgccaatgggacagatgcaaaacaaataaaagccccggcttctgaaaagaagcacacagaaatgtcattattttcaaacgaggtgttcccgtatataaaatttgatgttggttgggcatctaacagtattatggccagaggactcagaccacagctgcatccctgtgaggcacagactctccagggcacgcgggtcccgcctgggatgtgcacactcaggtgagctgcacagacaaggtgtcctcagcccaggggagccagaggcctgctctgcctctccaccctgatgcttcctgttctcaccccaccaaagccaaggcttcaatttcagtctgtggggagctgactctgctgctctcaagcactagaagaaggaaccagtaatcgaggaaacttgtggaccccaawgggtgtctgtcccggccaggcctggctgggcccacacaggacaacagggttcaggggtctggacagctgtttctgcccagggaattgtccctgccacctcacactggccactggaaaggaaagagaggaggaggcggcaggctaacccacccgtgagccagtcgagtctacattgtcagttctcacctcgaggggtgccaaaaaccagagggaagcaaaggcccctgaagcctctgccagaggccaacgccccttcttggttcaggagaggtgcagtgttaggtgcagcacaaccaatgacttgcttatgtggctaataaattgtcaagagaaaaactgggttagaatgcaatatatagtatgtagtctcatttttgtataaatacaagtatagaatggcataactcaaaatccacaagtgatttggctggattgtaaatgacttttattttcttcatttctcatcatattttctattatacataaagattcattgttaatataaaagtacaaaattgcaacctatgaattaagaacttctatatattgccagttagaagacagaatgaaaaacattctcttcattctaaccacacacacaaaaaagctccacaaaatacctatggactaccttcatagaaggtggaagagggtctgtatgaagaaaataattaatacatgaaagaagaagctagtcaatgtggagctctattgtgtcccgggatcaacaaagacaagatatctttaaaatcgtcttctaaatttaccctaatgtaaaacaaatccaataaaactctaatgtaattttttaagaatttaaatttggaataattccaaagaacaatttttcttaattttctacagccagaatatatacctttaaaaaaaatgaaaacagagattaactttctcagaattggttgactcactctttccttttatttttcttccatggaattttccagttaacttgagaaagtggaatcgaattccgatgttgaattttccttctggccccattcatgtggcaggtggtgattcaggtactactgggggctgctcagacaaacctcctcatcagacatcaagaggctgttgcaccaggagggccggtaccgtgtctagaggtggtcggcatggggttggagttgtattacataaaccctactccaaacaaatgcatggggatgtggctggagttccccgttgtctaaccagtgccaaagggcaggacggtacctcaccccacgttcttaactatgggttggcaacatgttcctggatgtgtttgctggcacagtgacaggtgctagcaaccagggtgttgacacagtccaactccatcctcaccaggtcactggctggaacccctgggggccaccattgcgggaatcagcctttgaaacgatggccaacagcagctaataataaaccagtaatttgggatagacgagtagcaagagggcattggttggtgggtcaccctccttctcakaacacattataaaaaccttccgtttccacaggattgtcctcccgggctggcagcagggccccagcggcaccatgtctgccctcggagtcaccgtggccctgctggtgtgggcggccttcctcctgctggtgtccatgtggaggcaggtgcacagcagctggaatctgcccccaggccctttcccgcttcccatcatcgggaacctcttccagttggaattgaagaatattcccaagtccttcacccgggtaagagaaatagtgttgattttagggagaataactcagcaattggatctggtatgtgtgtattcaactcatttgcagacaaattgtggttgttcaataccagcctgttgtgaattacctgaattgatagcatcctggagcgacactcaaaatgtgtcgcctgtggtgcagctggagcccggagcctgcgtgccaggccccggaggcccccgccggtgccttgtcctggggctgatgatggggaggccggcgaggccgggctgctgcgacgccaggataaccgggctggcggccagatgcgcactcgctgggcgtccgcctgtgtttgccaaagcacgagttgaaacgtgaagtgttgggccagcccgtgtggcaccaatacctgccgcctacgactgttgtgaacactgaatgggccaacaaacctaaacgttaaatgaactgataacgccgtcagcacggagcaggcgctgggtgtttgcgctcttgcgcgtgcgctctgtggggcgcaggctgacggcgggcgggggtcgcctgctccagctcgggctcccgcgccagaaccgggtccagaaccttgattccggaagcgggcaacggggtggttggtgggcgcgcctgagggaagggacgtgaggagccggagtccgcggagttgccgcggagttgtccgcggagtccaggcgggtggggagcagagcagctggaaccccccgagcgccctgcagacgcagcagcctcttgaggggagggtctcccccacctcgggctggacaaagacagcttttccccacgtccctctgggttctctagagcaacagcaatacccgcccggcaggggtgtggcttagagccccgcacctcctcgccgcgcggcgggcctgacttctagccacsggtctccgcagttggcccagcgcttcgggccggtgttcacgctgtacgtgggctcgcagcgcatggtggtgatgcacggctacaaggcggtgaaggaagcgctgctggactacaaggacgagttctcgggcagaggcgacctccccgcgttccatgcgcacagggacaggggtgagtccgcgtccctggcacggagcggggggtgcataacacgccccgggacagttacgggcgctagccacgtcggcgatggccaaataataaactaacagtaatattatagtaayagcatccgaaggatgagatcaggattagggcgatggcccccgcgcgttgcctgcsgagcgaggcgcactgagtcgcccaggaatccggcctctcggcgactgtgcgggagagtttatggggatgggcggggctgcttctgagcaggagtcgccgcccccacccccaccgttccgcctctgggcccgcaggctcctcccgggagcgctttcccctcctgttcaaccgccggggtacaggtggcttcgtccaccgaggtcccctcacccacgctgaggcgtcggaagctgcggacactgctcgcttcagggctttgctcagctgcagctggtgacctccagagagggagtctctgatgtcccgctggggtggatgtcctgagaccrggaagggggaagagacccactgaaatcctatctcccagcctcacctctgctgtctcctccacgcttcctgtctccagagccccgagttcagcataagcagaaagcggcctgttccctctctagggagaggagggttgcggtctggaggtctggctcgtctttatctgcgcattctcccagcctcctggcttcagacctcagcgaggcggcggctgccggccggctctcctcttcctgcctgcagacctggcctgctgcttctttctccttcctccctccctgcctgccctgcggtttcaaagtagattagaaataacagtgtcccacatggaagcctctacttcttcctgggtcaactttgatgacgaggctccagaaaacctttgcaatgctgtgtggaatttttaaatcggtgagctcgtgctcttgccctatttatttgtccagcgtacatttctgaacattgtgaacgtcgaatgggccaacaaatctaaaaattaaatgagctgataaagaacgccgtcagcacagagcagacgctgggtgttcgcgctcttgagcgtgcgctctgcggggcgcgggctggtggcgggcgggggtcgccggctccagctcaggttcccgcgccaggaccgcgtccagaaccttgtctccggaagcgggcaacggggtggttgtatcacaattagtggcatttggttttccttcttctgcattgtgggttttacttctctggggttgccaaaaacaaaattaaccatctcagtccttgtcgttaacgcaggagaagcattactggaggaggctctggggttctgtggttgaggagctcagttctggttccggggagcccttatctgccacccacgggtccaaggcacagtcggaggcagcagggaggggagcggaattcacatcaacacagatggggctcaaggggactttgctgcctctgcctggagggtctaaagtttcattttcatatgacccgcagggcgcagactggcggaaaattagcagagccctgggcatgggctgcacctggcccttaagggacaatgatggaaatattccttattagcacaatactgagyacaggctgtgtgataatgtgtcaagggaactgcagacatcctttcagaaaaagttcataaaacggagaaagtttggttcccaacctagatttttaacctgttgaactctgtctaaatgggtcatctcgggatgtcctccactcaacatgaccacgtctgcccctctgtcccacctgtctcctcagtccttcctccccacctttcaggatgaaatgaaaccctcagtccagctgcacccctgccccacccacctcatctcatgtgccctcccgcccctctcaggccggacagccttgcttctggaacacacgagcacagcttcaccaggcactttctgagcaccctgcaggcgcctcccaggagtggtcagtggtcaatcagctaatgaagctgcataggacatgacccttgtttaccgcagaatgcccagagctggcaggatgtcttatatgcaggaagtacccaaaatgtatttattgaggaagtgatgatggataagaggaagacggagagcgagggagagaggggctaggggcccctgcggtgtaaagggggtgtggctgggagtgtgcaggggaacagggatcatttcaaggttcctatctgggagaaaataaaaaggtttacagttagttgagataagcgtgggaatatgcgaacatttttaaagaataaaaagtttagctttaaatttgttgattccaaatgtgttcatactctcgggaggatccatcaagcaactcttgggaggagagacagggcagggccaggccttgacagctcagaagggygcagtagggacagttcttggttttcccagctctgatgctttgcacagtcrcttgtgtgacctgcaagattttagtgaagaaacttgctgtggagtcggaaagctgcaagttgaggtgtgtgtggtgtgagggttaaaaatctgtgagaacagaatgaatggcttttcaagaatgttgtcgatagataggaaagaggtgggaggtgttcttggagtggccatatgtggttttatgtagcatggggaagactcagcagaaaggaaaaagaaagaaggtaaattgacagcatgaagtagagcacccaggagaggctacatgtgatgaagaaaccacagtgcagactgtgaggaccccagaaaggctcctccccaaaacctgaccagtggccggtgctggcagctcccaggctgggacacccctctgtctctctgtccctctgccccctctgtcacttctttatacacctgtaaatcctgccctgctctccaaggccctctgtagcccatttctccccaaaatgggtatttagaataaccttctgctggcccctctgccttaggaatcatttttaataatggacctacctggaaggacatccggcggttttccctgaccaccctccggaactatgggatggggaaacagggcaatgagagccggatccagagggaggcccacttcctgctggaagcactcaggaagacccaaggtgcgtatctgctgcctagcagggcccagtcctcttgcagaccagcggtgtggggagccctggctgggactcctagactgcatctgaaccacagggacctayggacaaggagagggtctcgtgagtccccagatactgcattttacaactctaggttccagctacacagttcagggagcaagggtggccattaaacacgtgacttgtatcctaaatactgttgaaaagcaaaggaaactcaaacaggttcagacattcactatctttcgtaaactggcagttttcagggcaccttctcacaggccttggtgaacctcagtgggtgactgagcaggtggaggagtctcctcacccccatcttctggttgccctgactgcctgttttgtaggccagcctttcgaccccaccttcctcatcggctgcgcgccctgcaacgtcatagccgacatcctcttccgcaagcattttgactacaatgatgagaagtttctaaggctgatgtatttgtttaatgagaacttccacctactcagcactccctggctccaggtgaagccactttcctctttcaycagtcatcaactgtagagtttacgttagaaaaagaaggaaaatttgggttatatgtgatagacaggactgcaaaagccaaacaacatagcttcgaggggtgtttgattagacagcccaaatattcctcccagagacatctctggggccccacgcaccccctttcctaacgtcaggatgtgtatcgacctgtgtgtgcacatttgccatgcagagtttgcactgctgaggagaatggtgcccaagaaggacactgttgacccaaaatattccaaataaacaatgattacagccacaaattcaggtttggagaaagttgttggtccaacacacacaattatgttgcatccagaaaaaagtagtaaaatatttttttccctctctagctttacaataattttcccagctttctacactacttgcctggaagccacagaaaagtcataaaaaatgtggctgaagtaaaagagtatgtgtctgaaagggtgaaggagcaccatcaatctctggaccccaactgtccccgggacctcaccgactgcctgctcgtggaaatggagaaggtaggctcggccctcccatgatgtgggctctccggggtgggcagagaatgcacaatttcagatttacagagtgagctgcacttgctggtgtccagacctcccaccgcagcatgctctgagtttcatacacacactcttggcttcagcatgaccactggacgcaagtcagcctgcctggctgccaagctggcctggggytttggggtcacatgggcgggacgcttagctctctccaggccctgctgctcaaccctttctagtctgcagactttgagaattgcattttgtctgaggagaagccctcagccttccttgtgggcatgyactccccaactgtgcgcasstgcaggacttccaggcctccccagcttcatccacctgcaggtgctcaggatcctgatcccctgcccccttcccaccttggtgaaacttcttgtatccttgtcttgtcctttcctatggcttgtggctcaagaacaaatgtggagcccacactgatttcccaggactgtctgagcatcttctccaccagtttggcccctcgtggcagcagamactagccctgtagcaggaggggttagcaggarccgtttagctcctgcctgagctatgaccaaggtcagggggatctcacctctcccaggatggccctcatgctgtggagggagacagagccctggcctgccctcagcagatttctgggagcctcagtttccctggctgtgaggtggagatgactctgtctgtcacagctccaagtcacagttccactgggagagcctcttggacactgtctcctgtgtccctgtggagctgggaggtggctggttctgtgctgaaaggagacaagcagccccttctcctccggtctgtctccggtatcacaggaaaagcacagtgcagagcgcttgtacacaatggacggtatcaccgtgactgtggccgacctgttctttgcggggacagagaccaccagcacaactctgagatatgggctcctgattctcatgaaataccctgagatygaaggtaggcaagtgactgaagggacaccgtgcgtgcggctgcatctccctggatggccagccttgcacattttaggctgcagctttctgtctgaagctgcttgttaaccctcatggtgatgtggtgagatggctrgatgcactgctgtgaggggaggtgttatggtctgtgctgaacacctggtactcttgcacactggttggtccataccccactaagacacccctggttgcagaaaagaacatcccaacaccagagtggagagaggtggcagggtctgcattctgctccataaataacctctttatgacagagaagataatgtcccagttccccccaagtaagacctggtcttctaggcagagcaggtggggaggttggagctggaggggagggtccttgctggggcgtcttcctcaaatgcggacgtgaggagggaagtccaggaagaagcagctacagctgccctggacccttgtcgttccttccacagggctcctcccagcggcacctggggcagctgggactctgtgcctggaggaggtgtgaaaggtctgggtctaggtgggcagagggtcatgccctgagaaacacccatctgggccaagtagaggtgatgtgagggcacccgcatgcaaacaggccagtcagggttgggtccaagtaaaggggaggaaagggagctgcagcctggctggagagtgccggggggcccagagcccctgcctctcgctgggctggaaacagggctgggcagcctctgcccgaggcagttcacagcctgagtggtgtgtgccgccctcctcctgaagctgctgctaatggtcacttgtggtcttaaggctcgtcagttcctgaaagcaggtattataggctatgaagttatttcccccaagaaagtcgacatgtgatggatccagggtcagaccctgggcttttcttgttctttccttcttcttcttctttttatttatttatttttttttttgaggggacagggtctcactctgttgcccaggctggagtgcggtgatgcaatcatggctcattgtagcttctacctattgggctcaagcgatcctcccacctcagcctcccaagtaactgggccacaggtgcacaccaccacacccagctgattaaaaatttaaaaaaattattttggctgggcacagtggctcatrcctgtaatcctggcactttgggaggctgaggcaggcgatcacgaggtcaggagttcgagaccttcctggccaacatgatgaaaccctgtctctmctaaaatacaaaaaagtagccgggtgtggtggcacgcgcctatagtcacagctactcaggaggctgaggcaggagaatcgcttsaacctcagaggcacagggtgcagtgatccgagattgcaccccactgcactctagcctgacaacagagcaagaatcagtctaaaaaaaaaattgtagagacaagttgttactatgttttgtaggctggtcttgaactcctgggctcaagtcatcctcctgccttggcctcccaaagtgctggggttacaggtgtggccacmgtgccccatccctggcctttgctttttcaatcacatggaaatgtgaagggtgaaggagccaaaagtttagggaaggaatcattgtatggatctgcagtgattataagagaactttcgactactctgcactaggggaaccatggaatcaaaaaatgttttaaattattatttatgaggaggttccaatatagacaaaaggaaaataaatatgattgacatgtatatatccattgccaaattgaacgtttattaacattttgcgatacttmcatcagagctcttaaaaagaaaatgtgttacagagccagccaaagtctacctcctcacatctccccacctctctcaccagaaatggcttcagaattgctgtgtggctttgcacttttaacagttgttaattatcagcacartattcatattattgctgtatgtgtttaatattttacctgggtactgtacataacattttgcagcttggttttttcactcaacatatgatgatgttccatgggaactccaaacacggggaggctaggcgacttgctcaaggcagctgttacctctgtcagaaagacagagrctttcagattcaagaagtagaccctgcatgtctgattctgttctgtaaacccccttcatactcagaagcatgcaataaacaagcctggggtaattatcaatgcaaaggttaccctcccagaagaaatttccaaaacactttcattattctctgctcttgacatgaagagaactgaataagccatcatcaactgagataatggatgccaaaacatccagtaaataacctcatagagcttagctctcactaagtttttggagcatyttccagtaattcaaaggacctggggaaccttaagcactgcttaggatgctccataaacatcttctgcgtgggtaggggagtggatggatggctggatgggtgggtggatggacggacggatggatggatggatggatggatggatggttggatggatgggtgggtggatggatggatgggtcaatggatgtgtggatggatggaagggtgggtggatgggtggatggttggatgtatagatgggtggatgggtggatgcttggatggatgcgtgggtaggtggatggagggatggctggatggatgggtgggtgggtgggtgggtggatggatgggtggatgggtggttgggtggatggatggataggagggtggataaatgggtggatggatggatgggagggtggataaatgggtggatgggtggatggttggatggatgggtgggtgggtggatggatgggtggttggatggatgggtgggtgggtggatgggagggtggatggatgggtggttggatggatgggtgggtgggtggatgggagggtggatggctggctggttgggtgggtgggtggatggatgcatgggtggatggatggaggatggatggatggatggaggggtgtatagatggaggggtggatggatgtgtaggtgggcagatggataaaagcgtgattgaatagatgggtggatgatgggtggatgcccaactggccaggaaccaatccctgaaatttgtcccattcatatcttggcagagaagctccatgaagaaattgacagggtgattgggccaagccgaatccctgccatcaaggataggcaagagatgccctacatggatgctgtggtgcatgagattcagcggttcatcaccctcgtgccctccaacctgccccatgaagcaacccgagacaccattttcagaggatacctcatccccaaggttaagcaatgagcctgcagcacacagcatgaacaccatcctatcagctaatcgccttcctgccagggagcaggatgggggccccaagacccttccctttggcaggggtcactgagkggaagggctggccccactcccaccctgtgggatactgcatctccaggagtgctcacattggcctggtgaccagagaggtggaggaaatctggaaaagagcctcagcagatagtgyctgggactgtagtgaattctaatgccaggaacaaactatcacaaccagccctggggttaatcctgtgagaagattagggctttcatcttcatttagacctgacccctgactgctttctatctaatccttcactaagcaactccttcaactsgaaatatactatcctatatagcataatattcaaaacwacattcttcactgggggtttccagatgaaagcccacattttgttaacatgactsactgagacagtctttgtttctcctagggcacagtcgtagtgccaactctggactctgttttgtatgacaaccaagaatttcctgatccagaaaagtttaagccagaacacttcctgaatgaaaatggaaagttyaagtacagtgactatttcaagccattttccacaggtgagaaagatcagaggcagtaccttcccttgaggagcagcccacactcctcatctcccctccacatgtgctctgccctcgtcccaggcacccactgacaccccaaacctcactgtgtgccctgtttctattgacaacatgacccaaatgtgctcttccctgttcagagaagttacataacatcttttagcagcaatcctgggaatgaagtgttgtaggtggattttttttttcccaaagactagacattttacatcattcattgctaaattttgtttctattttaacaagacttagtgaaaagctctcaaagccatattacccaattctccctaattttaaaccagagctactaaacaaaacctaacctttggttacctagaatcatcacaggaagcatcaaagccttcctgggatgtgactcagtgattttctttgaggcacttgtcctccttcccagggcctcatcttagggattgttgtgggaagatcatacaaccaactccatacttttcacacccagtgctggagccccagcttctaacagggcactatttccctcctgtaggcatcactgatgagcactgggggtgccttctttactgggcagacayggtcttcccaacttaacaccggtttttgcagttgagctctggataattgagattgtatgaagrctggtccccgaattagtcagtgtygctggtatccttccactcaagtacattttgtgcttcttttaataggcagagargggtgagtcctgccytgtgatggccgtttgcccacagcctcctcctccccgcttcccctagtctcactgttaacagtgtcgtgtctctgaaactccctcagtgtctcatcaataccattgttacttctaggaaaacgagtgtgtgctggagaaggcctggctcgcatggagttgtttcttttgttgtgtgccattttgcagcattttaatttgaagcctctcgttgacccaaaggatatcgacctcagccctatacatattgggtttggctgtatcccaccacgttacaaactctgtgtcattccccgctcatgagtgtgtggaggacaccctgaaycccccgctttcaaacaagwtttcraattgyttgaggtcaggatttctcaaactgattcctttctttgcatatgagtatttgaaaataaatattttcccagaatataaataaatcatcacatgattattttaactatatgttaagtcatggaatatcttaattgtttaagtgattctcacagagaggtttttttttttttttttttttttttgagagttttgctcttgttgaccaggatggagtgcagtggcatgatcttggctcactgcaacctctgtgtcctgggttcaagtgattctcctgcctcagcctcccgaatagctgggattacaggcacccaccaccatgccagctaattctttgtatttttagtagagacagggtttcaccatgttggtcaggctggtcttgaacccctgacctcaggtgatccacctacctcggcctcccaaagtgctgggattacaggcatgagccaccgcgcccagccagagagaggttttaaatatatatgtttactttaatattaagttataacataattttcatgttattgaaaagctcttccatctaggatcacacaacttcagtgtcagaatcatattgaggtggggaatttgtattagtcaggtttctctaaagggacagaaacaataggatagatgtatatacgaaagggagtttattaggagaattgactcacatgatcataaggtgaagtcccacaataggccgtctgcaagctgaggagcagggaagccagtctgagtcccaaaaccctaacagtaatcctttcctaacgtcaggatgcgtatcgacctgtgtgtgcacatttgctgtgcagagtgtgcactgctgaggagaatggtgcccaagaaggacactgttgacccaaaatattccaaataaacaatgagtacagccacagattcaggtttggagaaagttgttggacaactcactttatgggacaagttaataaataagattttgcaaacccaagtgcactatcatcctcactattctggaaaggttgaatggactaatggtatcttgaagctaaaattagttaaaccaacagagtcaagtgttttatcttggtcaaaagtttttaccactagccttaatggtaattagattaacccctgtgggaaaacacaaactaaccccttatgaaataattactggaatatctattcctttgatagtacgatgttgtgtattccctgtacttgttagctctgatgtgactcgacaatgcaaggccttgatgcattttacaaatgtacatttccaccagttgaagtaggctttctgtgaaccaccaattgagaatgttcagatcttccatcacctagaacctaaagattgggtcttttggagatgacactagagaaaaactgcccttgagtctcactgaaaaaaaccataccagggtcttcttactactcaacactgcagcaaagcttcagggtcttgagtcttgggttcatgtctctgaactaaagagagctcccttggattcttggacttgtcaacccataggtgacttaaaattgagaatatccaagggaaatcttttttagaaacagatggcatcgcaaagttgacagctttcccaaaacggttcacggagacttcatttgactctttttcattgactaagatttgtttttgttttgcattaatgtaaagatgttcaaacttcctcttttgttaggaactttcactactcaaaccaaacatcctctaagttctactgtgcagagtatagccactctcactaactgaagcaattgctgactatgtcatctagttatatgggaagaatcaaaagtaatattagaacctcatcccatacacatttgggtgagcaattcaggaagctgactttatcaaaacgtttggtatccttcccttggcagattggttgattttttttcaatgtataaatattatcattctgtgtttgtttcttgattgtgaaaacatttggagagaactgattattataatcagagctaggaagattatcaaataatgttgctgctgctatttgaacgggtggcctgcctctccacacttgcgggcgtttctcgttgggtggaacgagagacttaagaaaagaaagagacacagagacaaagtatagagaaagaaaagtgggcccagggaaccagccctcagcataaggaggacccacgccggcaccagtctgtgagttcccttagtatttattgatcattatcaggcatttctcagagagggggatgcggcaggacaatagggtaatagtggagaaaaggttagcaggaaaacatgtgaacaaatgtctctgcatcataaacaaggtaaagaaaaaagtgctgtgcttttgatgtgcatatacataaacatctcaatgccttaaagagcagtattgctgccagcatgtcccaccttcagccctaaggcggttgtcccctgtctcagtagatggaatatacaatcgggctttacaccgagacattccattgcccagggacgagcaggagacagatgccttcctcttatctcaactgcaaagaggccttccttcatctcttaataatcctcctcagcacagaccatttatgggtgtcgggctgggggatggtcaggtctttcccttcccatgaggccatatttcagactatcacatggggagaaatcttggacaatacctggttttcctaggcagaggtccctgcggacttctgcagtgtattgtgtctctgggtacttgagattagggagtggtgatgacaagcatgctgccttcaagcatttgtttaacaaagcacatcctgcacagcccttaatccatttaaccctgaggtgacacagcacatgtttcagggagcacaggcttgggggtagggttacagattaacagcatctcaaggcagaagaatttttcttagtacagaacaaaatggagtctcttatgtctacttctttctacatagacacagtaacagtctgatctctctttcttttccccacactattgtattttactttttatttttaaaattttttcatctccataggttcttggggaacaggtggtaggtatttggctacataagtaagttctttagaggtgattaaaaaaaaaaacttgctcatgcatgtttatagcagcacattcacaattgcaaaaatgtggaaccaacccaaatgcccacgattcaacgagtggataaagaaactatagtatatacatacgatagactactactcagccataaaaaataatgagttaatggcattcacagcaacctggatggtattggagactattcttctaagtgaagtaactcaggaatggaaaatcaaacatcgtatgttcttactcatgagtaggagctaagctatgagaatgcaaaggcataagaatagactttggagacacacaatggactttgggaactcacgggaaagggtgggaagggggtgagggataaaagactgtaaattgagttcagtgtatactgctcaggagatgcgtgtacctcaaatttcacaaatcaccactaaagattggttgatatttatgatcaactagtttgacgttgggaagaagctacagaaccaaagggatagcctataattactactggttttctttctctccctttctttctttctttcttttctttctttctttctttctttctttctttctttctttctttctttcttttctttctttctttctttctttctttctttctttctttctttctttccttttctttccctttctctctctttttttcttttgtttctttctttctttttctttctttctttctctttttttgagacggagtcttgttctttcaccaagctggagtgcagtggctagatctctgctcactgcaacctccgcttcccagattcaagcgattctcttgcctcagcctcccgagcagctgggactacaggcaaacgccaccacacccagctaatttttgtatttttagtagagacagggtttcaccatgttggccaggatggtctcgatctcttgacctcgtgatccgcccacctcagtctcccaaagtgttgggattacaggcatgagccaccgcgcccggcctactactggttttcttaaagtattcatttgctcttaatgaaactgcaaaaggttttcatttttagttctgcaatctgtgtctttttgaaacatctcagatttatatcccaggaattcaacttttgtgatacctcactgaattccaatttgcaggccatacatattgccttctgttctttatccctttgaaaaggtatgttttttccctcgactatgatgataactgtctccttccatcttttttgtcaactcctgtaactttttctctggttataattctgctgttatggcctgacactgaaacgtttattttcaaggtctagaaaaggcaatgttttcctccagtatcacttgattctgtactcttggcttttcttggtatgtctgaattgttcaatgtaatcgggaaacttaccatgctgttattaagagccatgtattccctgagcaaggtacttgttttcttgtttacattcctctataatatggtatacactcataacactggacacactcttcctgtgtctggttaaagtacccttttcatcaggtttgacttccaggttatctaaatgggcctttagcattcatatttctagcaggaaccttaaaactttcaatctctacttacctattacccagttccaaagccatttccacatgtttagatattatcacagcagtaccacattcctggtaacacaatttgtcttagtctacttgagatgctataacaaactatcataggctggatggctttaacaacagaaatatacttctcatagttccggaatctgaaaagtccaagatcaggagctggctgatttggttcctggtgagggctctcttcctcgtctgcagatggttgcattcctatcatgtccttagattgcacttccttggttcatgcatgtgggtaaggtggggagaggcgggagaggggagattttcctgctcttataaggcaactgataagggtcccacccttgtgactcaatctaagcctaatcaccttccaaagaccatacctccaaatattaccacactgggggttaggatgtcaacatatgcatttaaggagggacataaatattcagtccttaacacaaagggggtggttgtggtggccacggtcaaatactcaggacaggaattcatggtggaaagctgcagtagggaaataggagaggcactgggaagcgggctgtcctctcctcaaggacaatttcctccttgtgaaagcaataatcttcattaaatgttaaaaaagggatgggtagcagtaacctctaccaggtttcctcttaggtctgggagtgtggggtgtaggttgtggcagagagccaagccaggatcatgacacagttgtgtaatttgaaggtttcttacttagtctgtttagtgttgctataaaggaacacctgaggctgggtaatttataaagagaaaaagaagtttatttggctcgtgattctttaggctgtacaagatgcatggcactagcatctccttctcatgagggcttcaggctgcttccacatatagtggaagataaagggggaggtgctgtgtgcagagatcacatggcaagagaggaagcaacagaaggggagggaggtgccaggttttgttttcttttaacaagcagttctcatgagaactaatgagtgagaactcacccaccccaagggaggacattaatctattcataagggatctatccctatggtccaaacacctcccattaagttccatctccaacactggcaatgaaatttcaacaggagatttgaagaggtcaaacaaaccaaactacaacagaagggaatattgggcctgggagtctgactggcaaatatcttttaagtcaaggagctgtgtgggtgcacagcttgcaaaggcaacaatgacatctgcagtaccatcataatgaaccaaggtgcggtaacccaactggcaaagtgagagccccaattaagggtgggcaagcaaacagttttccaca

SEQ ID NO: 94245 - DNA, 27012 bp, Homo sapiens
  misc_feature (1)...(27012): n = A,T,C or G
ggctaagagaagtgacaccttgggaacatacatgccatcccgccatgcctacgtatgatcaggttctacccttcaatccccagccgagccgtgttgtacttggagaaagactaccactccttcagtttcaatacccttggcgagtcctggagtcactctcggaaatgggcacatgaagaaacctgctacttcatcttccataaaatctctgttggcaggccaggcgtggtggctcacacctgtaacccagcactttgggaagccaaggtgggcagatcatgaggtcaggagttcgagaccagcctggccaacatggtgaaaccctgtctctactgaaaatacaaaatacaaaaattagccaggcgtgggggcaggcacctgtaatcccagctacttgggaggctgaggcaggagaaccacttgaaaccggaaaatagaggttgcagtgagttgattgtgccactgcactccagcctgggcaacaagagtgaaactctgtctcaaaaaaaaaaaaaaaatctctgttggcagttgtgtccacacaagaaatccctttcagaatctgatctcgggaaaattctctgcttctcagtgaggattctggaacacattgtttcctccttcttattttagccgacaggaagctcagggccctgtatgtttatctcagcttgtttccctcatccttcataatattttgatctttccttttgaccgtcttgaatattatttatttattcatttattgaaatggagtctcgctctgtctcccaggctggagtgcagtggcacgattttagctcactgcaacctccacctcccgagttcaagcaattctgcctcagcctcccatgtagctgggattacaggcccgtgccaccacgcctggctaatttctttattttcagtagagatgggattttgccatgtcggccaggctggtctcgaactcctgacctcaggtgatccacctgcctcggcctcccaaagtgctgggattacaggcatgagtcactgtgcccagccttgaatatttttaatattttaaataatagctgccatgaatcattctcggataagatgaatatcctgggaacaataaagacatcattctggttggatggctaattctactgcccttgatggggtgcgattgtgggtgtgtgtgttgggggcagggagggggaggatgttggctgccctttgccacactcttcggacacgaagcctctccctgtgccctgagatcatcctggctggagcacagcatggcagtggcgagtcccactgccccgctccccttactcaaagctgggcttgaaggaaagcagctccccgtgggaactccactggaacactctgcaaaattctagatgctgagttcattgcaagctgtcaggcagcacgtcatcctttcttcatctacgaaacctggggatgtgcagaaccactggtcatagagtcacaccaagagtgaaagaaggaactattgataataaaatatgcaaagcagggctatgtcctctagcgctggcccgtgccctggcttgcctggatgtggtccctgagtctgcccctccttcagttagaggatcctgggtctcccagccctccccagaaatagctcctgtcctttggggccttcacataatgtctagaggcaggcaagccccctgtatttgttcccattcactcccatgggcactgggacacattggacaagttaaacacaaccgcaaggaatggaattctccttctgtgttcaggtgcatggaggtaactggaggggggtctcttctgcctagttctcattccttccacctctagtggtctctgtagctccttatttttatctcctccctttcctagtcagggagaagtagggggtgggcctaccttgctggagtgggggtgtggggcggagcaacttccaggcactgagtgtggagtgggtactgggtttgggtcgctctagaaggggaaaggggtgttcttttgttctgagatctatccacaggagggggtgttgcgggatctacagtgagggtcagtctgctatgggaaacggcccctgcctgggcacaggcccatggctaaagctgttgatccagcattccttaaccactgtttctccaagggccatggaaggggctctcccctggatggggtctgcagacagacaagggaggagaagaaagaatacaccagctctgaggccctggggcagcctcaggcgggaagcacacgccaggcccgggggcagcctgagccacacggaggcctctgaggccaggccggaacctttggaagtgtgactagctctgcttcctcgtgtgtgtgttctcttagcctataggaaccttccttgtgagaatgccagcctgtcacagctgggaggcagctgtggaaagagaacactgaatttggagactgaaggcctgggtagaattgtggccgccctcccacttccttgagcaaatcactacacctgctgagccttgccttcatctgtgaggggatgaagccttcacataatagccttcaccgtgctgtagaggggatagatttagaaatttggtgtggaaatacctcatatagggaaggggcgcagccgcgtcatctgtcatcttagttgaattgtttttgttttgttttgagacgaagtctcgctctgtcacccaggctggagtgcagtggtgtgatctcggctcactgcaacctccgcctaccaggttcaagcgattctcctgcctcagcctcccgagtagctgggattacaggcacccatcacacctagctaatttttgtgttttcagtagagatggggtttcaccatgttggccaggctggtctcgaactcctgatctcgggtgatccacccacctcagcctcccaaagtgttgggattacaggtgtgagccactgcgacctgcctgagttgttcttagaggagcagaggctgagtgttgtccattcttggcctagaagtcaaacaaggaaacagagaggcctgtggtctggggggcaggcatggctggaatcataaggatatcactgagggggaaggtgcaacttggacaggggctgccacagggtcagccactctgcatgggaactcctgtaagggggaccgtgtggcccacctccacctgctcactgaggaggccgcagctcacaatcagacacggagggccttggctgggcgcaggaggggccggtcacccagggcctccgctccaaatctgtgttcctgtgacctgccaccctggaatctgatcgcaccctggcccgttgtgctgggtagtctctgttcccagtaccgtgtcccagccttagctgccagcatgctgtcacccttgggcacagagggagggtaggaagtttgtcaaagttcaacacacttggaaatgttgagcaggcaaatctccttttgggatgataaactttaagaaacagctacaggccgggtgcggtggctcacgcctgtaaacccaaagaaagttgagaactggcgcctgcccttgaactgctcatgctgtgtaatcaaggcggggcgaacacagtgataacagggcaagtctcagcccagaacaaagcaagggccactgtgggagacggttggtgtgtttggaggtagtagagattggcggagtagctagtgaagctttcagaggcctgcagtctcttcagcagtattttgaggagggaggaacgtgatttgttggaaacagaaggcaggggtttgtggaaattgcagcagtattactatctgcacaagcatagtacaaatagcacttccatagcacaatccatagcactttcacaccagctcagcttatcccccagcagccctgtggggtaagcactgttatcatcacatcaacctgagataaggtaggtagaaattctagagatggagatgcaggggtgaggtgctctgagcagagggaactgcagacgcttgttaacaacctctccaaacaggtaggggctccaggcctctgatatctctgtcccttgacttttaaaaaatttagtaaaatagatgcaacataaattttagcattttaaccatttttaaatgaacagttcagtgggattaagtacattcacatcattgtgctatcatcgtgaccatccatttccagaacactttttcatctttccagactgaaactctgtacccactgaacactgtcccttgactctctaagcctcaagtggaaatgggtctctgtcatgactggcattatgcctatggattccctaacacatctttgcaaacactcttttttttttttttttttttgagatggagtctcgctctatcacccaggcgggagtgcagtgctgcgatctcagctcactgcaacctctgcctcccaggatcaagcgattctcctgcctcagcctcctgagtagatgggattacaggcacacaccaccacacctggctaattttttgtatttttagtagagacggagtttcaccatgttggtcaggctggtctcgatcacctgacctcgtgatctacccacctctacctcccaaagtgctgagattacaggtgtgagccactgcgccaggcctgcaaacagtctcttaattaaactatcctcaatgtaccccactggactgtgacatcattctcttgctgggcattggtacagtagctctatgatgcaatttgctaaaatgatcttatctccattgtacaaataagaagctgaggcaagaggaagctaaataattgcccaaggtcacaaaaccagtaagagatagatctgggatttaaactccagcagtctggttccaagatagttgaaacctaagagaaggctacatagttgaatatggtggtgccgctgtagtcccagagactcaggaggctgtggcaggaggattggttgagcccaggaatttgaggttacagtgagctatgatcatgccactgcactgcagcctgggtgacacagtgagacactgttgaaagaaagaaagaaagaatgagagagagagagagaaagagagggagaaagaaaaagaaaagagagaaagaaaaaggaagaaagaaagaaggaaagaaagaacgaaagaaagaaaaagaacgaacaaacgaatgggagagagagagacagaaagagagaaggagagaaagaaagaaaacaaaggagaaagaaagaggccaggcatggtggctcacacctgtaatcccagcactttgggaggctgaggtgggcggatcaggagttcaaaaccagcctggccaacatggtgaaactccatgtctattaaaactacaaaaattagctgggcgtggtggtgggcgccagtaatcccagcacttggtactcgggaggctgaggcaggagaaagaaccgagagagagagagaggagagagagagagagagagagagaaggcagaggggcaaggggagagagagacagagagaaggctacagagaaacatggggattcagcacaagctgaagagacctcaggaaggctgctgcacatctgggcggaggagagcaggagtaggagcccagcctcaggcgtgttgagatggaagagcatgtcctgatgggagacactgccactgctagcggctgcctgccccttgtccctccctgagctgagccatgcagtcagctgaccctgccatgaagaggctgtgaggagcctcaccagggatgagctccgagggccagaggtgaggatgatgctgatataggagtgaaggtgtctcaacctgtcccgggccacagccttgccaccctggtgagtggcatggcccgggtgtgactgatgtgaccaaatggatttactccactggggaagggctcctgggtttgcctccctccacagcactgcctgggagcaccagcataaaagcaaggccaggcgcctggaagagcggggagagagtggtggccacagtgtgtcagagccttgggaccgagaagcaaaagtgaggagaggagacacaggaccagggagatgctctccctgctcagtgggctggctttactggccatctccttcctgctcctgaaacttggcaccttctgctgggacaggagctgtcttcctcctggcccactccccttccccatccttggaaacctgtggcagctatrctttcagctgcacccagagacactgctccaggtaggaagcctgtgctcaagctggaggccctaaaggggtggacasatgaacccctcttctctctcagaccagcggcactggagacagaaagaaggaacagaggtcagacacgtgtggggtgaatcctggtcttaccattcattagctgggaggctttgagcctcagtttcctcgcctgtcaaatgcagggtgggagggggattgcagaaattgtggacttcgtgcagaatctaagaagtctaatctaagaaattctgagtgcaggagaagtccactgccaatrgaacagggtggcgaaaaccactgaacagagctcaactccaggagagcactgtgtgtggctggaagaagttttctgaaaagccacttgagatgggagttggggggaatgggacccccacaagggcacattcaagtgacgttactcaaggaatctgtgcacaaagccaccaccagggtagctggagcctcagctgaagggcgctgttggattgagtgggtgggactggggtgctgctgagaatgattgtgggcaggacactgtctttcctaaggccatgttcagccctcttcttattcacactcaacacatttttaaaaaatatctggttggcgctatcagacaattatgatcctcaggcttcccacgcagtggaaagagcactgtactgggagtcaggagacctgggttctaggtcttcatcttttactgtcttttttggcctgtttttttgggggttttgtttattgttttgttttgaaacggagtcttgctctgttgcccaggccgaagtacaatggcacaatctcagctcactgcaaactccacctcccgggttcaagcgattctcctgcctcagcctcccaagtagctgggattacagacgtgtaccaccaagccctgttaatttttgtacttttagtgagacggggtttcaccatgttggctaggctggtctcaaactcctgacctcaggtgatccacccgcctcggcctcccaagtgctgggattacaggcgtgagccactgcaccyggcctggcctctgttttttttaaactcataaaatggagataaattgcctacctgcacacttatactgagggtggactcaagcaaaatatgtaaagcccacgtaggacaccaagcccttgagaaactggttatttaatatcatctgtaaaatgggtagaacattccacctcccaggattaatgggccctgactattccaagtgcacaggggacctgtgacccagggcttggcttgcctggggaacggggctggaggcactctgagaaggtgctcctgcagtaagtgtcccccatctctccacagctggcgcagagtgtgttcaccgtgtgggtgggcccgatccccgttgcggtgctgagtggcttccaggtggtgaaggaagcactggtctccaactcggagcagttctccggcaggtccctcaccccgytcttccaggacctgtttggagaacgaggcagggctgcccctcctgctggggagggggaggcggctagatggtcactacactcagggagttggggatggctcagagctgttaacagagaggggactgyccaggaggacctgcgtgaggggtgggggtgggatgacaaggaaccagctctgggagttgaaagacctggattcaagtctcaacccaagccctggccagctctgggaccccggacaagtcggcctcactctctgcccctcagtgggctcctgtgtagatggrgataatgatggctttatatcctgagaatgtggggaggggattaagtggccaaaatacctgagagtgcgcactcagtgcctggctcagcaaatgcccttgttccctccttccctctccccagaacccctcctccccttcttcttctttttttttttttttttttgacccagagtcttgctatgttgcccaggctggagtgcagtggcacaatctcggctcactgcaacctccacctcctggcttcaggcaattcttgtgcctcagcctctcgagtagctgggattacaggcaggcaccaycacgcccggctaattttttttttttttttttgtagtagaaatgggatttcaccatattggcaggatgttctcgatctcctgacctcaggtgatccactcgccttggcctcccaaagtgctgggattataggtgtcagccactgcgcccagcccccattgtttatctcctcttccatttcttgtggggacttttaaaggaaaaatcaggttggtgggctgggggagggcatagctgagaccaccttgagggcaccaagctcactgaccactccctcaaatgcccctcagccctgggacacagcatcttcccagaggtgattttggggtctgccctccaggcctggcccaggtgagagccaagtggtcttggcctgggaggctgggaggggctrgcgactgtccaccccaccccaccccggacccaggcatcatctgcagcagcgggcacacgtggcggcaaaagagacgcttctgcctggtgatgatttgagggctgggcctaggcaagctggcgctggaggtgcagctgcagaaagaggcagcagagctggcagaagccttcygccaggagcagggtaagtagcaggctggcggcaggcctaccctcaccccctctccccacgcacgcgcacacccctgcagaacaggcgagcttcactgcataggcgtgtgtgtgtccattaagcctcagaacgttaacagccgttttaagctccattgagtgggagtttctccaaggtgggtagacagaggtccaggaatggccaaggtcactggaaagccacagccctccttgatagctggggattttccatcaacatccaaggcagccgggcacggtggctcccctctgtaatcccagcactttgagaggctgaggcgagcggatcacctgaggtcaggggtttgggagccgcctggccaacctggtgaaaccctgtctctactaaaaatacaaacaattagcccggtgtgttgggcacgtgcctgtaatcccagctactctggaggctgaggcagaagaatcgcttgaacctgggagaaggaggctgcagtgagccgaggtcatgccattgtactccagcctgggcgacagagcaacactccatctcaaaaaaataataataaataaaataacaacaaactaacaaacaaacaaatcatcccaggcgtctcacacctccagccattggcatatgcatttccccttccagaacgccccagcccatgtcccttccctccccatgagaaaccactgttccttcctccagaccagctgcggtcacctgccctgagaaatcctcctgaatgccaggcccccaaaccttttttattccctgctgtgccatacctgccccacattctgttgttattctgttgkcattcaaattgttgtctgtctcccatgcctctctctgacctggctcgtagaaggtgcttggtaagcacttgggtttttttgtttttgtttgttttgttttgttttgtttttgagacggagtttygctcttgttgcccaggctgagtgtagtggcacgatctcggctcactgcaacctctatcccccgggttcaagtgattctcctgcctcagcctcccaagcagctgggattacaagtgtgcgccaccagacccagctaatttttgtattttcagtagagacagggtttcaccatgttggtcaggctggtctcaaactcctgacctcaggtgatccacctgcctcagcctcccaaagtgctgggattacaggcatgagccactgcgcccggctggtaagcatttgcggagtgcatgagtgaggaatgggaatggaggactgagttagtaaatgagcgactagatacgagatcagatgggtgctcagggtagtgcttctcgtgcctcctcgtcctgagccctgcccctctaccctcaggtagacccttcgaccctcaggtatccattgtcaggtccacagtcagagtcatcggggcccttgtgtttggccaccacttcctcttagaggatcccatcttccaggaactgactcaagccatcgactttggcctggcmtttgtcagcactgtgtggcgccgggtaattggcatttggggaggcaggtgtgcaggccattaccttaggggcccgaggcaggcaggggcctcagccagggcctggcagggagggtgcaaggtgggcaggagggagaccgtggcttctgcctggtgagctgacacattcagagcatcaaacctttgttgtggttcagcatgaatgcatgggcaaggaatcagaggctggttatatcctaggacatacagctttctggacctgcaacatcccagcgaagccctaagcacagctgctctgaccacagctctcatttctgtctaaattatttggggagtctccagatgagaggcagccctgggttactcaagtcaaaggctccagcccactttggagccccccgactcagaggctggctcctgagtaggccctgggtgggygtctctcyccacagctgtatgacgtgtttccctgggccctctgccacctcccaggaccccaccaggagatatttaggtaccaagaggtcgtgctgagcttaatccaccaggagatcascaggcacaaactcagggcacsggaggcccccagggacttcatcagctgctacctggcccagatctccaaggtgagcctggaacagctgctcaggaaaggaggggccatcttttygggctgcacctcgtttctgagcacctcctttctaagccatggtctcagtttctcatctttgactctatctacgagcttccaaagcacgctgaaaatgtgagttaaaacagggttttcctccctactttttcccagggcagggctggcttctacagacatgggtagggtgggaagcagaagacctggctgatgtcagggccagaacaccagggcagccacccaccaacatcaatgcagtcctgagaatcaggccctctcaaggggttggaacctcaagttctggccgcacaggtctcagatcaggcttcaaggaaaccccagggctctgtcaggagagaattttagacctggagctgcgccccccactcgcccacccccgamtygccmggccatggatgaccctgtctccacattcaaccaggagaacctggtctaggtggtgatcgacctgtttctgggaggcaccgacaccacagccaccaccctgtgctgggcactcatccacatgatccagcacggagctgtccagggtgacaggcccttggtcacactctggctgactgccccatgcatggggcttctgggccatgggcattgcctccatcactctccttgmtctgtggccccaggggtgggtcctgctctcgccactgtggtacaggaagtgttcatggcttcgagtcagacaggaggggcttcagttcccaccctgctgcttactgcgtaatgctgggcaagtcattccacctctcagacccagtgtacaatggacaacactattctactcattcagtaatgattcagcacctactaagtgccaggccctgtgccgatgtccacctcaagatcacaactgtggaggggaaaatgtagctggatttctctcaaggacaaactgactatgacctgaattcaaatctggtgccacaagtttcgtgaccttgggcaaaagtacctgtcctgttagagcctcagtttctccatctgtaaaatggagacaacagtccctcctccataatgcttttttttttagacggtatctcactctgtcacccaggctggagggcagtggcacagtcttggctcactgcaacctctgcctcctgggttcaagtgattctcctgcctcagcctcctgagtagctggaattacaggcgcaccaccacaagccgctaatttttttgtatttttagtagagatggggtttcaccacgttggccaggctggtctcgaacttctgacctcaggtgatccacctgccttggcctcccaaagtgctgggattacaggtgtgagccactgcccccggccataatgctgttcatatagagcacctgacacatagcaggttctcaaatctgggtgctctctcttccctccagtgccccctggaggaggaaaccctacaaaaccttgttcataagaagcaagctctgcctcagagaagggtctgctcctgtgagaccaggggtgacagggtggtttggggtgacccaagggccgcaagcctcggcagcagtgtcctgggtggggacggaggcggtgagggaggatgggggtgccagggcacaggaaccctccccagacccacactaagccacctgcggagacggtgcagctggagctggacgaggtgctgggtgctgccccggttgtctgctatgaagaccgcaagcgactgccttacaccatgctgtcctccatgacgtgcagcgcctcagcagcgtcatggccatgggtgccgtgcgccagtgtgtgacctccacccgtgtgtgcagctatccyrtgagcaaggtaggtggccctacgcagccccacacccaacccagtgcctgcagaaagcatccttcctgccagcacagccatctgctatagcttctgccaacctgccagctatcagtcacttaayctctctctctctctgtggcgtttgggacgggggttatgattataaaagaatgtagccgggtgccatggcttacgcctacaatcccagcactttgagaggctgaggtgggaggattgcttgagcctaggagttcaagatcagcctgggcaacatggcgagaccccgtctctataaaacataaaaaaaaattagccaggcatggtggygcacacctgtagtcccagatacttgggaggctaaggcaggaggatcgcttgagcccgggaggttgaggctgcagtgagccataattgcaccactgcactccgtactgagtgacagagtgagactctgtctcaaaaaaaaatgtataatataaagaatgtactcactgagggataatttttaaagttctctgttgttcagagataacctttgcagacatgataatccaccactctccaatctttttttgcacacatatagtttacatagttgcaattctgctgaatatatcattctgaatccttcattgcacttaatattcagattcttctatagcagtggttctcaaacttccaggtacatcagaatcacctggacggcttgtgaaagcagacactgctggactcttcctccagacattatctgtctagggtgggctgagaatttgcctttctaacaagctcccaggtggtgctgatgctgtgagtccagggaccaygctttgaaaaccactgctcyacatcattctgttttttgttgttttgtttttgttgttgtttttttgaaacagagtcttgttctgtctcccasgctggagtgcagtggtgtgatctcggctcaccacaacctctgtctcccacgttcaagcgattcttctgcctcagcctcctacatagctgggactacaggtrtgccaccatgcctggctaattttttttttttttttgtatttttagtaaagacggggtttcaccatgttggccaggctggtctcgaactcctgacctcgggtgatcgcccgcctaggcctcccaaagtgctgggattgcaggtgtgagccaccacactgggcatctacatcattcttaatggctgcataatgttccaccaaayggatgttttgcaattttaacccttgttggtgaacatttaggccatttgcaatttatgtgccttaggcttggtctgcattttgtattatctccttaaaactggtttctagcagaaatgccttgcttgcttctttcattttatagcaaggttaagaaaacaagtgccaaataaggagagaggaagaaagttataaaaataagtcaaatcaagaacagttgccacatatgtacataaaactcgagtctgaatttcattggagtgaagggaaaaaaggaaatctcgattaattatgagttattatgtaataaaaggaagcatgcctgtatcaggaaagctttggcttatcacatgcctgtaagttatgacaaggatcatcattcacaatattcttttgtgggccagtggaccatgtagtggcagtgatttaagcaggagtttttaaaagatgcagaaatattcttcaagatggcagctgcttcttatctcaattccttttaagagataaaattcctttcattcctacagtcagccaaaataacacagttgaagtttatataaataattatttatttttaacctctattcttttttttttttgagatggagtcttgctctgtcacctaggctggagtgcagtggctcaatcttggctcactgcagcctctgcctcccaggttcaagctattctgcctcagtctcccgagtagctgggatgacaggtgtgtgccaccaygcccggctaatttttgtattttttagtagagatagggtttcaccatgttggccaggctcgtctagaactcctgacctcaagtgatctgcctgcctcagcctcycaaagtgctgggattacaggcatgagccaccgcgtccggccaatatttatttatttttgagacagagtcttgctctgtcacccaggctagagtgcattggcacgatcacrgctcaccacagcctctayctcccagctcaatcgatcttcccacctcaccctcccgagtagctaggactacaggcatgagcccccatgcctggctaattttcgtwgtttttgttgttgttgttgctttgtttttttgcagagatgcagtttcaccatgttgcccaggttggtctcgagcatagttgaagatgatagctctctggtgatccagcttgagatagctttccgagcagatttttgacgtgagctggacaataacatgaggacacctgctctttgcccaggcttgctgtgtgctgagggctttgtgcccacggtgtcattcggtacaatggtgctctgtattgttgacggagccttgcagatcctagatgacagatgttgaattacttacctatcttactgtgtaacaaattaccccaaaacttagtggcttagaacaacagcatttatcatttcacagtttctgagggttaggaaaatgggtgtggctcagctggatgcctctgactcaaggtctctcatgaggttaccatcaagttgttgttggggctacagtgtcacctgaagactcccctaggggaggctccacttcaagctcacttacatggaggtcttcaggacccggttgctcatgaactgttgkctggagaccttcagttccttgacacatgggcctctgcatagggtagctcaaaacatggcagctgaaccccatcagagagagcaagcaagagggcacccaaaatagaagcaatggtctttttgtaacctaatmttagatgtgatatcccattgcttttgccatattctttttttttgagacagaatctcgctctgtcaccccaggctggagtgcagtggtgcaatctcagctcagtgcagcctctgcctcctgggctcaagcaattctcctgcctcagcctcccgagtagctgtgattacaggcatgtgccaccatgcctggctaatttttgtatattttagtagagatggagtttaccatgttggcyaggctggtcttgaactcctgacctcgagtgattggcctgcctcagcctaccaaggtgctgggattacgggtgtgagccaccgcacccggccgcttttgccatrttctatttgttgggtttgttgttgttgttgttgttggtttgagacagtgtctccctctgttgcctgggttggagtgaagggacacaataatagctcactgcagcctcaacctcccaggcttgggtgatcctcccacctcagctgcctgagtagctggaactacaggcaccacattgtgccaccacaatgggctaatttttaaatttttggtagagatggggtttcaccatgttgcctaggttggtctcaaattcctgggctcaagtgatcctcccaccttggccttccagagtgctgggattccatgcatgagccactgcgtctggcccattttctatttgttagaagtgagttactaaatccatcctatcctcaaggggaggggattacacaaaggtgtgtatcctgggagtcaaggctaactggggtaactatcggggaatctgtcccgatagtcacgtaggttcttttctgtttttcctaagcgtcggccagcttgagaaataaagggacgagtacaaaagagagaaattttaaagctgggcgtctgggggagacatcacgtgtcggtgggttccgtgatgccccacaagccgcaaaaaccagcaagtttttattagggattttcaaaaggggagggaatgtgcaaataggtgtgggtcacagacatcaagtactttacaaggtaatggaatatcacaaggcaagtggaggcagggcaagatcacaggaccacaggactggggcaaaattaaaattgctaatgaagtttcgggcaccatggtcattgataacatcttatcaggagacagggttttgagagcaactggtctgaccaaaaatttattaggcgggaatttcctcttcctaataagcctgggagtgctatgggagactggggtctatttcacccctatagcctcgaccataagagacaggcacacctaggggggccgtttataggcctatacccccaggcgcgtattctctttcccagggatcttccttgctgagaaaaagaattcagtgatatttctcccatttgcttttgaaagaagagaaatatggctctgttccacccggctcatcrgtggtcagagtttaaggttatctctcgtattccctgaacaattgctgttatcctgttcttttttcaaggtgcccagatttcatatcatttaaacagacatgctctacaatttgtgcagttaatgcaattatcacaaggttctgaggcaacatacatcctcctcagctgacaggattaagagattaaagtaaagacaggcataggaaatcacaagggtattgactggggaagtgataagtgtccatgaaatctttacaatttatgtttagagattgcagtaaagacaggcataagaaattataaaagtattaatttggggaactaataaatgtccgtgaaatcttcacaatccaggttcttctgccatggcttcagccrgtccctccgttcggggtccctgacttcccgcaacaggtaacataccaacatgtgtaggtggtgaggttgccattttaatgaaaatgaaacagagcgactcatcttggtgccctggtgcagggtgatgcctctgtacatagaggtggtggcgggagccctgagactttcctcggaaaggagctttggctctgcccygagtactgccctggagtacagtggtgtgatctcagctcactgcagcctccacctccggggctcaagcaattctcccacctcatcctcccaagtagctggtattacaggcacgtgccaccacgtccagctaatttttattatttttattttttttttaatttgtagtaaagacggggtttcaccaggttggccaggctggtcttgaactcctgcctctgcctctcaaagtgctgggattacaggcataagccgccatgcccagccccattattaacttattattaatttgcccagacttgaggttccttcctccacagatttttttcttcacagaagccctatccttcggacgctttgttgctgtttcttttccatagatagagaaacttcagcataggcagcttaagaaactgcccaaacacagctagtaagtgacttagctgagtttcaaatgcatgtccctctgactctaaagtgttttcttttcctaccatatgccctgctgtttgtatttatacgaaaatgccactctaggtaagtgaaccaatgtgttcaatggagatgttttacactgtcattctgtccttggcagaaattggccagcaagtttacaggtttgtcargagtctctgggaaagtggataggaccagggcatcaggtcatcttgctgctggcgtggcagaaggacccaggcccaggttgtctagaagctgtgccaacttaagttaaaaagagggggccagggtactgctctgtgttatgccgtttgggattagaaatttccttattaagagctcattcmtgccaatttgattctaggacttgttctgtgataaaggctccaggggcccattaacgagctgaaatcaatattgagcttttacaacttggacgagagatgtctgctgaaagtggaatcaaagcttgacagtagatcattaaatgtkacagatattcctaaactgttcctaaccatttcatcagctgagtgatcgtgacaacagcaatagtccctgatacgacggttgcacttccagcctgtctctcttctcagacattctatttgattgcgaattccaaattgccatttactgggcagaagctggcacagcgaccccaggaggtacccagcaggtagatggttctacagtctggggaagtggagggcggttgttgcggggggcggggcgctgtcctttttgcatactggataggctgtgctctgaacctgttccatgagctgagaacctcctttgcaaggaggccagaacatcacccaaaaaaggacacaaataattctggagggaaaagagcatcttgctaggagcctcctcctctgaaggtgattagtaagaaccgttgcaatgcagaggttacttaatcccaggtagagaaaatgggggaattcccatgactagaactgggaaatctatagctcactcaggcagcagcaagaacacaggcctccccaacacctctgcttgaagctacagagtgagcaagtctgggtgccctattggtacacatggctaggatgaggcaccttgcctaagcgtgccgtactgcaacaacggcaaaaaagaacaatttcccctgaaaacaatttctgcattctgttttttttkttgttgttgttgttttgtttttttagatggaatcttgctctgtcgcccaggctggartgcagaggcgtgatcttggctcactacaacctttgcctgcctcagcctcccgagtagctgagactataggcacttgccaccacgcccgrctaatttttgtatttttagtagagatggggtttcaccgtgttggccaggctggtctcraactcctgacctcaagcgatccgccctgattggcctcccaaagtgctgggattacaggtgtgagccactgcgaccagccagcatctgctgctccatttctgcattctttattggtttctgtttagaatgcaggcttcaaactcgctaagcttttttttttttttttaatttcaagctttttctttggtcagaatcaagaattctgtagtcagccctctggtctctacagggatagctggtttaattttgtggtatttggtaaatgagccctggggtatgaggccttccccggaatcccagagctgagtgttctagggctggggaccataaccgaccccatcctggctccactttggcctccttatgctgtttccggtcagcccagggcccacatggtaaggagcagatgttaccctgctcccatctgcttggtctgattctctttctaatcactcacttctcctttgagatagagtgagggctgaggtgagggtgagagggaagatttgggtttgggtttgggggaaggtgagggttggggttaggttgaaggttagagttgggcttatggttcatgttttcctctccccaaccctaaagagtgaagcttgctgtctcctctctgtctttccatcactcagttcctctttctctgcttgtttgccattccatttctcctcgttctgtctcttcctcttaacacccacgtgtgcacacatcccctgccccagtgtgtattgtcctgggctgtccttggccccttccagacatgcccccagctgttggccttctctgtaggaggcaatggcttcatgtccctagacgtggctgggagtcttcaggacaaagctgggcagtccttagccaggagggtgtcctgctcagctccttcactgatgtgagcctggaggaagggcagcctgagggccggctgctgagtctcctcaaggcccctggactactcccaccaacacactgggtattctccaagctcactgtggctcagtgtcagggctgggtactgggtaccatctgaggctccctgagccacaccagcatctctctgcagggcaccatcatcttacccaacctggcctctgtgctctatgaccctgagtgctgggagacccctcgacagttcaaccctggccacttctcggacaaggatggaaactttgtggccaatgaggccttcctgccattctctgcaggtactaggcacagagctggatcctgggtggtgggtggggctgtggtgggacagacacagggacagctgccacctctgacttttctctctgtttccagggcatcgtgtctacccagcagaccagctggctcaaatggagctcttcctgatgtttgccaccctcctcaggacctttcggttccaactgccagaagggagcccggggctcaagctggagtacatctttggcggcacttggcaaccccagccccaggagatctgcgcagtgccccgcctgagcagccccagccctggtcctagggaggatggcctgtagccactgggggtctggaggcctgtcccccatgaagtccttcctcagtctcttttggttcctgcaaagttagaaaagaggaggaccaggggttcatgcagctcagctgctcatggttgcccctaacacaagctctgtggggtgacactggagaatagacttagcaaggattctacagaggtagctcagtttgggtagttcaattcttaaattaggttagttatgctttggcaggcgaagattttataagattggttaagtttggcattaaatcagtccacaaagttaatattggggaatcaagcctcacaaggcagcagctaactaggttcagaggaaaaggcaaactttcgagcaaaactatgaatataataatgcatgcaaatgcgaatactctagatgccggggactggtaaaccaaaaaaaaaaaaaaaaaaaaaagtgaagcgggggcagcttattttctgccttctcctgccctctcctgaccagaaggaagaactgcagttctctgcagacctggggcagagaaagatctcaccatctcaatacagcaaagccagcagaccatataactgtttccagcaaattcttcaccaaagacccactttagtttccacacaagggtccctaaattttgaatccttgcatctccagacaagccttgtttattaaaaaagaatgacttgtggctgggcatggtggctcacacctgtaatcccagcactttgggagaccgaggcaggtggatcacttgaggtcagaagttcaagaccaacctggcaaacatggtgaaaccccatctctactaaaaatacaaaaattacccgggcatggtggcaggcacctgtaatcccagctactcgggaggctgaggcaggagaatcgcttgaacccagaaggcagaggttgcagtgagccaagatcgcaccactgctctccagcctgggatccaagagtgaaactgtctcaaaaacaaacaaacaaacaaacaaacaaacaaaagcaaaaacaaagaatgacttgtgagttccwggaggcagaggttgcagtgggcggagattataccactacagtccaacctgggtgacagagcgagactctgtctcagaaaaaaaaagactgacttgcatcaaggaaatgcaaactaaaatcaaatgaaataccattacataccgattagaactgctaaaaagaaaaccctgacaatcccaagtactggaaaagatgcgaagcaaatggaattctcataccctgcaggtggaaatgtaaaaaggtacgactacattggaaaacagtttggcaatttcttgtaaaattaaacattacaccacacaacccagcagtcccaatcttaggtattacccaaaagaaatgaaaatatatgttcacacaaatgcatatctatgaattatatgattccatttctgtgatattcttaaaaaggcaaacctatagggacagaaaatattccatagataagtggctgccaggattcgggagcagggttataggttgactgtaaaaagacatgaggaaactttctggggtaatagaaatgttctgtatcttgattgtggtgatggttacacaactgtatgtgtttgtcaaaactcatacaactgtacacttaaatgagtgttattgtatataagccatgcctcaataaatctgagctttaaaaaggaaatgcctcgggccggacacgttggctcacgccagtaatcctagcattttgagaggccaaggcgggcagatcaccggaggtcaggagttcaagaccagtctggcaaacatggtgaagccctgtctactaaaaatacaaaaaagttaactgggtatggtggcacgtgcctgtaatcccagttattctgaaggctgaggcaggaggatcgcttgaacctgggaggcggaggttgtagtaagcagagattgcaccactgcactacagcctgggagacagaatgagactccatctcaaaaaaaaaaaggaaatgccttacctctctcttttgtgttatttaaaggacgtacatatgaatgaaccaatgtttctaattagtaggagatcaatcattactgctacaccaggctgaaaggagtctaaccagaaataaaacatgacgtattggccaggcttaatggcttgcgcctgtaatcccagcactttggaaggctgaggtgggtggatcacttgaggccaggagttcaagatcagcctgggcaacatggttaaacccccatctctactaaaaatacaaaaattagccgggcgtggtggtgcacaccatagtctcagctacttgggtgactgaggcaggagaatcgcttgaacccaggaggcgaagattgcagtgagcagagatcgcgccactgcacttcagcctggctgacagagtaagaccctgtctcataacaaaacctaacaaaaaacaaaaaccatgatgtgtgaattagcctctggcctttcttcaggctttgtgaaatcctggagctttctcatagatatcttattttctgtgcggtgccatatccagggcctcgggagtccagactgggaagcactaggcaagtggggtcccagagagcaggagacagcctggggttctcggccctgggaggtcccaccctgagctggcagctctctgtgatccaggcaggatctggggcagagaaaacaaagccaggctctaattcacctgcttcctacctcactttcctaaccctttctctgttagagcccctgtctggagcttgcagccccttctaacactcatcctctccaccatccagcctcctgtctttgatcctgtccagccctctgcgtgttattccattgaaaggccaactcctccaggaagctttccctcacctggactttggccttggttgaaatcccagttttgctctcaataacccagtccttgtgtgcttcggtctcctcatatgacaaatggaggcttcctttaggattgtcgggagtgacaatgcccagcacagggcctggcgggtgatgaatgctctgtttatgttggcagggctctccttcccctagacagcatccaaaagtactcgcacctttgtttttagctctaaaatgatgacgctgcagggagcccttcccctgtggataggcttccctttcagcttccatatcctcatgacgatatgacaatagctgccatgtgttgattgccaaccgtgtgctaggaagtgcactgggcacctaacatagacgaagccatttaaataccaaagtgacaaggtagatacaattatctgaattaattaattaatttttgagatggagtctcactctgtcacccannnnnnnnnnnnnnnnnnnnnnnnnnnnnnnnnnnnnnnnnnnnnnnnnnnnnnnnnnnnnnnnnnnnnnnnnnnnnnnnnnnnnnnnnnnnnnnnnnnnnnnnnnnnnnnnnnnnnnnnnnnnnnnnnnnnnnnnnnnnnnnnnnnnnnnnnnnnnnnnnnnnnnnnnnnnnnnnnnnnnnnnnnnnnnnnnnnnnnnnnnnnnnnnnnnnnnnnnnnnnnnnnnnnnnnnnnnnnnnnnnnnnntcccaaagtgctgggatcacaggtgtgagccaccgggccagcctgaatttacaggaataaaagtcagaagctagccggtgaattagttagaaagtatcagaatatcaataagcctcagttccctcatctgcaaagtggagataacaatgctaactcatttgattgatattaacattaaatataataatgcggccaggcgcagtggctcacgcctgtaatcccagcactttgggaggctgaggcgggtggattgcctgaggttaggagtccgagaccagcctggctaacatggtgaagccctgtctctactaaaaatacaaaaattagctgggtgtggtggcgcacgcctgtagttccagctacttgagaggctgaggcaggagaatcgcttgaacccgggaggcggaggttgcagtgaactgagatcatgccaccacactctagcctgggtgacagaacaagactccgtctcaaaaaaaaaatatatatatatatatacacacacacacgtatatatacatatatatacacgtatatatatgtatatgtgtatatatagtgtatatatgtatatgtgtatatatgtatatatacgtgtatatgtgtatatatgtatatatatgtgtatatgtatatatacacgtatatatgtatatatatacggtatatatatatgtataataatgcagcctggtgtggtgactcatgcctataatcccagtactttgggaggccaaggcgggcagatcacttgaggtcaggagttcgagaccagcctggccaaatatggtgaaaccttgtctctactaaaaatacaaaaattagccggacttagtggcgggcacctgtaatcccagctactcgggaggctgaggcacaagaattgcttgaatcgaggaggcggaggttgcagtgagcagagatggcaccactgcactctagcctgggcaatatagcgagactatctcaaaaaaaataaataaataaaaataaatttaaaaatataataatgcatgaagaatacctagcacagtccctggtacatgctaagtgcctaataaattgcaactactaayaataatcaataaatattccttcgcctggttcatggtcagcacaccttacccagtccttccctttgtcagctgactgagccctggctgtcccctgaggatgctcctgcagcctctgaatggagggtgcttgtttcctgtgccagttcaggttctgatcagaaagggcacgctcactcactcaaatggagcaatgaggagagtttcagaacagagaacacagaagccaatgcatgtggctcaagaagggagggactgggaagaataagtgctctaaactcatttttcccttatgctccgatctcttgtttgtggctgtaattggctgagcccagctaggagccagagagcaagagagcccattgatgtagtccataaaggtcagcctcctggccgggcgcggtggctcacacctgtaatcccagcactttgggaggccgaggcgagtggatcacctgaggtcaggagttgaagaccagcctgaccaatatggtgaaaccctgcctctactaaaaatacaaaaattaggccaggcacagtggctcacgcctataatcccaacactttgggaggctgaggcaggcggatcacaaagtaaagagatcgagaccatcctggctaacatggtgaaaccccatctctactaaaaatacaaaaattagctaggtgtggtggcgtgtgcctgtaatcccagctactcaggaggctgaggcaggagaatcgcttgaacccaggaggcagaggttgcagtgagctgagatcgtgccactgcactccagcctggcgacagagtgagactctgtctaaaaagaaaataataaaatacaaaaattagccaggcatggtagggggcactcgtaatcccagctactcgggaggctgaggcaggagtatcacttgaacctgggagacggaggttgcagtgagcagagatcgcaccactgtgctccagcctgggcgagagagcgtctcaaaaaaaaaaaaaaaagtcagcctccggtggcctggagcagtgtatgagagtgagctggaggggcaagcggaggatattcagcacaccccagccccaggccccttaggttccggaggtgagcatcctcctcatgccctcataattcttccagattacttgcccaaagaccaccttgaccacatatgtctcctctgctgaaactgtctcctttatctctagcacctcttcagcactattaatagccttctagtcaccctcttcttcactgaaatgttaggatttcattccaagtcctgccatcaccctgaagacctcaagttcgtgtgagcaatgcagtcaacgtccaggacctctctgt

SEQ ID NO: 94246 - DNA, 23129 bp, Homo sapiens
  misc_feature (1)...(23129): n = A,T,C or G
cggggctgggggggcccccgtggggcagaatcagggcggccttgtggagccgtaggtcgccttccctggccggcgccctcctgactaactctgagccctgagtttcggggcggtgaactctggcggattaagcgagcggggattccctcggggagcccggtgaggcggccgggcaggtcggctgcgcgcagggcaggttggggccggcgagttcgggcgcagccggttgggttccgggaggggctccgggaggggcggttaccgaagcagcgctccgagcggatgcggcccccggcgcgggccgtggcctccaggacccgcaggtgcgggaaggcggagtggccgcagagcctctgcgccgcgcccagccccgcgatgccgccgcccaccaccagcacccggggtccgcccggggcctccccgacgctgccggtcgactccatcgcgcggtccgggcagtccgagggcttctgagtagccgggaggtctggagctctcggaggaggccggaggcggagcgagggggcggggaggcgctgggaggggcggggaggggcggggaggcgcggggaggcgcggggaggcgcggagaggggcggggaggcgcggggaggcgcggggaggcgcggggaggcgcggggaggggcggggaggggcggggaggcgcggggaaggggccgggccgagccccacagtgcgcctcggcctccgcgagcctccggactgggctcgggtctcagagggaagtgccccgcgtgggagggcccgcgaggacaggcgtcagggagcgtcccgcgctgccgggcggtgcgcgcgagcgtccccatggagggagaagccggccggccgggcgggccagtgtctcctgcaagggagacgagggcgcagcgagcgcttcccccagggacccgcgtcgagtgcgagggcgcagtgggtctgggggtgccacggtgtcaggggtgggacctgggagagcttaacgcgtccggaggggggctgtgaaagcctccagcatcgccagcgagccgtcagttcgcgtgtgcgcgcgcctgcgtgtgcgcgtgtagtcacagggctgcagggacacaggaccaaagtacaaagtacactcgcaaagtacaaagttcagaagccgagggcaagtgcagaaacgtccctcgcccgggaagttgagcgcacacccaggcacgcctgtgtttctggagaatccccggtgcaggcggccgagttttctgctgcatcgcagcccgcgggggttggaaaggctcccgccctgttttcaggcgcgtccccgcctcctgagccccggtcctctgcggaggggccgcgcgctccagtttgccagcgtgagcttcactcttcgctctcggcgtgggcctcctgagccgtgtcttactttcctttgattccctctcgtcccagctggagaaaaggctcccggaagggtgacctggtgtcgctggattccactccccatcactccctagccaaccccgcgagctgagctccaggcagggagaggggcgggtgcctgggagtcgggctgactccctgggcggtggcgggcaggggtcgagcgtcctctgtccgtcaggggcccgcagcaccaggaggcgacgctggatgcagtggccatctcctcctgcctccaggccatggggaacccagggcggatcccgggtcagcagggccagctgtccaccaagctgacccacccgacatgccaggactaaggaaagaagggctgccccacccccttagtcggatggcaagtgtttggggtgcagcccccgccacgagtgtcacctgttctgcctgagcaggcttctctcttactccctgctcttgggcctgaagcagagccgctggctcagtggggcgctccattctgaggtccctggcatgcaccacggaagcccagcgggaccacmcacccacctgccccagctccccagcggaggtcctgagatggcagattaaatactctggggttctgaattccacagatgaactgggtcccccacgggtatggccaagggaacggcccactccctagtggctccgtgtgaaatcgagctgctgctgctctcgccgcagggcccagctcactgcccagacataggagcacatcgccctgcgcacaggctgggtgggcacagctgtgagggaggccaccccatgcctcaggcctcctgcacaggcgtgggcctcgccactctgggtggacaggctactttggcccctcagcctctggggactgctgccctgttttcagcaccgtgtcaggcaccatctggtcagccagctcctccagccccgagactcccgtgtcctcattctcctgggccgttacggtcggccagtgcccagcctttgctggaaggctgtccaggctgggctctggtcaggcatcgatgtcccccaggcacctggcctcacctcgcgttgggacagcctctgcaagatggaacaggaagggtctggctttgcctctgtcaccttctcccggtccatcatgtcctcctggccagcccgttcctggttcctgcggggagcccagcccgaaggggaaccgaaagattctaacttaactctagttcagcctcccggatcctcctgtggagcggcaggatcccataaaagctacttggctcagcaacttgctggccaagcctccccacagcggtccacacaggccagaggtaaacatgcccatgccccacacctggaaggcctggtgcaaggaggggttgtagtgactgaaatgggaactctggctttatggcgcggagagagaagacatggacccaagagctgcagggtggggacaaccgacgcgctctttgtcccctggatgtggtgccacagcctgaatccaatagcacgggccrctgacgcgctgacctggggctgggttagtcgctcgtcccccttgctctgaaatggagagtgcacgtgaccacggccagtcctggacaatcctgccatgccagagccaccagctggaacacacggacacaacctcttttccatctgactggtacaaggtatgtgcttctcctagctccagagggccttgggtggtgccacctatggtgatcaaggtggcaactacccatgtggctttgactgaatcaggcttgttcattttttaaaatagctttattgatatagacatcatgctgtaagacttctcccgtttaaagtgttcaattcaatggtgttcagtttagttacagagttgtgccactgtcaccatcatccagtttagaacttttttgttttgttttgtttttttgagatggagtcttgctctgttgcccaggctggagtgcagtgacactaccttggctcactgcaacctctgccttccaagttcaagcaattctcctgcctcagcctcctgagtagctgggattataggcatgtgccactacgcccggctaatttttgtatttttagtagagacggagtttcaccatgttggaccaggctggtctcgaacacctgacctcaggtgatccacctgccttggcctcccaaagtgctgggattacaggcgtgcaccactgcgcctggccccaagtttaggacattttcatcaccctaaaaagcaaatggggatgcccctcagcagtcccccccattacccctccctccagcccctggtgaccgctaatctagtttctgtctctgtggatttgcctgttctgtacatttcatagaaatggaacctattcaatgcacggcctttgtgtctggctttttttactgagcataacatttccaaggcttgtccattttgtaatgtgtatcagcgcttctttcttttttactcctgaatagagtccattgtatagtctaatacattctaatgtatccattgtttggatatatgacattttgtttatccattcatgagttgatggacaattggctttttccctctttttggctattatgaataatgttgctatgaacgttcatgtctaagtttttgtggacatttgtcttcatttctctgaggtgtacacctaagagtggagttgctgtttgaccttttgaggaaacaacagactgttttccaaagtgactgcaccattttccattcccgctggcagtgtaccagcgttccccgctcacgtcccccacaacccgctgtgactgttgggctttttattgcagccagcacagtaggtgtgacgtcgtatcactgaggggtcagtttgcatttccctaatgattcgtgatgctgagcttatctgacactgattatcttcattggaggaatgtctgttcagtcctctcactatcttggtagtgtcctttcagacataaaagttttaaattttggtgaaatccaatttacatatgttctccctttgttgcttgtgcttttgtggctacattacttgatggaggacgggagctgcccggcctcctgggtcgttagaaaggaaacctcttggcggacacggtggtccactcctgtaattccagcactttgcgaggccgagaccggtggatcacttgaggtcaggagttcgagaacagcctggccaacatggcaaaactcccgactctactaaaaaactacaaatattagccgggcatggtggtaagcacccgtagttccagctactcaggaggctgaggcaggagaatcgcttgaacccgggaggcgcaagctacgatgagccgggatgacaccactgcactccagcctgggtgacagcgagacaagaaagaaaggaaagaagagaaggtgaaggagaaggaaggaaggaaataaacctcttttctgtctgagccatttcattttgggcctgtctgtcccagaggtttaactacactagtatagagcatcgtttagtaaaggtttgttgaggtttgttgttgatttgtttctacttacacgagatgtcttcatttttaccctcggtcttgaaataaaattttggtgcatgttcatttttggtttgaattgaattattttcttgaacatagtgaggcaggagaacagggtctggaggccaattcatgctgactccctagaactaaatcaaatggaaacacttccgctatgacaagaagtgtcctctccatttacacagggcgtacaccaagtaaccaatggaaacctctagagggtatttaacccccccaaaaaatctgtaacggggctcttgagccgctaggctcagccgctcccacagtgtggagttattttcgttgtcttttcttgtttcttttttgagacgaagtctggctctatcgcccaggctggagggcagtggtgcgatctcggctcactgcaacctccgcctcccggattcaagcaattctcctgcgtcagcctcccgagtagctaagaccacaggcgtgcaccaccacgcccggctaatttttgtgtttttagtagagaggggggtttcaccatgttgcccaggctggtctcaaactcctgacgtcaggtgatctgcccgccttggcctcccaaagtgctgggattacaggcctgagccaccgcgcccggccacacttttgttttccataaatctcgcttttgttgcttccttctttccgtgctttgtttgtgcgttttgtccagttctttgttcaagacgtcaagaacctggacaccctccaccggtcacaatagcagtttcgctttccattccattttatccagggtggttttatctccaccctggcgtttgcagaatccgggcaagtacacaaatggatgctccacaatacttgtctagatatttaaaaggtataaataaaataacttaaatgaatgaaatttttattatttaaatctgttgaagtcttgtgtgcatgaaaataaaactcctcctaatgtggcgttcagtgcccacgccgctgccaccgtgcctggccctgcgcctgggcgcgctgtgtccgctgctacagacgccggcgggcaggcgggcaggcgggcaggcgggcaggcgggcaggcgggcaggcgggcaggcgggcggggggaggcggcgcagagcccggcaggcgccgccgttgcctccgcctccgcgcggtctccccggggccagctgggaccccgagggctggggcgggggcgggggcgcgggcgactgcggcggggcctggagggcgctggtcccagcccagggcggggtcccggggacgcccctcggccttagatccgcgagcggcagctcgggcctgggggcggggcctggcggagagcgacccgctcactctgcccgggctgatctcgcgagggccgcctggtctcgcggcgctggcctgtgggcggagcgagccctgaaaggctataggcgagggggcggctccgcggggccgggcgaggagtccagagagccatggccgccctgcgtgtcctgctgtcctgcgyycgcggcccgctgaggcccccggttcgctgtcccgcctggcgtcccttcgcctcgggtgagtgcgcggtgagagctggcggcccgaatctcctcctgactccgacctgcacgcccagaccagatcccagaccgcacccccctcccacctgaccccgcatcccccacctgaccccaacccacacccctcttccgcctgaccccgcaccctcacctgacccctacccgcaccccactccgcctgaccccgcacccccccgcctgaccccgcacccccccacctgaccccgcaccctccggcctgacccctacccgcaccccactccgcctgaccccgcacccccccacctgaccccgcaccccccggcctgaccccgcacccctcttccgtccgatcccgcatccccagggcctgactccgcactctcctgcctgaccccgcacctaccacctgaccccgacccgcagcccctgcctggctcaggcctgcaacacccccctcgcctagtgctgcaccccccacctgacccgcacccacagcctgacccaggcttaacacccccccaccacccgccaccccgcaccgacaccacccacctgaccctggcccgcacccccaccccctgcctggctctgcaggaggccactctcaccaggccacgtcctgcgggaggcccggcggctggctggtactgccccagtgccaagacctctggccaactgggcgcagggtgggggttgtaaaaatccggggtgttccctcggctctaagagcaggcgtagctcctgtgcagccggccagcccgagaacaggagatgcaggtgcattttgtcctgggtgcctcctgaccagggccacccctcagagggtcctaagggaaaagctgacacctcctccccagccacagggggctgccctcttcctccctcgtggctcacccggggccccactcatgagcggccatcaccggctctagtatctgaggaatcttgggccatgccttgggctggggaagaactcttgcttcctcttcctccctcaccctgtgtagcagtggaccactgagttgtgttggtttcatctccatgctctccttggccttcggcttctccaccctgacagcagccctttcctggatcttgcatggcgggcactgctgccagacacttcacctgtgatcttccagttacccctagaaacccacaggatacggcggggcacagtggctaatgcctataatcccagcactttgggaggctgaggcaggtggatcacctgaggtcatcaagaccaccttggccaacatggtgaaaccccatgtctactaaaaatacaaaaattagccaggtgtggtggtgtgtgaccgtagtcccagctactcgggaggctgaggcaggagaatcacctgaaccctgtaggcagaggtcgcagtgagccaagattgcgccactgcactccagcctgggcaatagagtgagactcggtctccaaaaaaaagaaacccatagcacagggactatgatccctgctctgccactaacggaggcaagcatccaacacacaggctacctttgtcttttcaggttcaccttctcacccctggaacgccattgtcctttgtctccttcccaccttgctgtccacccagcaggcgcaggtcctgtgcagcaggccaaccgagaagcgcctgcgtctcccattttcgggctggcctgctgctccggacctgtgcctgatcttaatgctgcaggaacacccaggattttcacatcccccaccctgcgtccagttggccagaggtcttggcactggggcggtaccaagtgcaaggagctgccttacaccccctcacctgttggcatttgttgaaagaaggtgtttcctggtgccttgtctcagcagagtccagggctgtctccagagtggtgtcctgggaagagctgaccaaggcatattaggagaaggaaagcggctgtgggctgtgttctgtgctggggatttttctttttttcttttctttttttttgagacggagtctcactctgtcacccaggctggagtgcagtggcatgatctcagctcactgcaagctccacctcctgggttcatgccactctcctgcctcagcctccccagtagctgggactacaggcgcccgccacaacacccgactaattttttgtattttaggtagagacggcgtttcaccgtgttagccaggatggtctcgatctcctgaccttgtgattcgcccgcttcggcctcccaaattgctgggattacaggcgtgagccaccgcgcccggcccggggattttctttaggacatgttcaaacacatgtgaaagcagagagaatggtaccaaggctaccatctatccttgtgcctgagagctacacctggagccactgaggactcggcagggagccctcagagggcctcttggggtcacactgtatccaccratggggccacatcccttcccccactctccccagtttgatacctgtgtgaatagatacccctttttgccttcttgctccaggtgctaactttgagtacatcatcgcagaaaaaagagggaagaataacaccgtggggttgatccaactgaaccgccccaaggccctcaatgcactttgcgatggcctgattgacgagctcaaccaggccctgaagaycttygaggaggacccrgccgtgggggccattgtcctcaccggcggggataaggcctttgcaggtacgcgyggcagcagaggcctttgtgtctgggcagatgtgggaggcacgtatggccttgggagaagyctccagacagatttgygcctctgtgatggcagaggcatgcgactggggacttcctcaaatatcgagtgaagacggtcatgggaacggcttgcatgagcagctttgtgtatgccagagagctgcatgtgctccaccagcaaaacagcttcttcaaaggggtttaggtccttggcagtcaggctttgtgtgtgtcgagggcttatgccctgacaaatatgcctagcctctgtgggcgcctcccttgcacctgctgcctgcctcagggcccctctgcgtgacttctgttatagctggcattacagcgtccctacagctgtccacgtggcctggtgtcagccgtgcccagcaaccccactgcctgtgtctggtgtgctctgaagttccttgytggtctgagagatataggatgggtgggctctctgctctctggtaactggaacctcctttccactcctgctagctggagctgatatcaaggaaatgcagaacctgagtttccaggactgttactccagcaagttcttgaagcactgggaccacctcacccaggtcaagaagccagtcatcgctgctgtcaatggctatgccgtgagtgttgctgccaagagtctcctcctctcgtggttgaaggaaccgtgctgtgcatacacagcataacagatttttattttgaagaggcctttagttcccaggccagcagcctcctttcctgcctcatggtgctaaagagccaggaactgtgtggagaggacacctcctggcatctgcttttttcgtggctgttcacctgacagcttctccccagcaagcctctcttccagggtgggggaagagaggtgttggctttggctacatctataaactagcttcttttgctccccttgaaagctctgtgtcctggtactatttgaagtgctgagactgatcttggcctatagggaagcaatgtgatcatttcatgacgctccctgccgtgtaagccaggggtctgcggattgtgatcatttcatgacgctccctgccgtgtaagccaggggtctgcggatggagttttcccggcacagccacacccacctgtgcacctagtctctgtggctgcatttcggccacagcagcagagttgagtcgtggcagcagagcctgtaagaccctcatggtcctttacaggatgtttgccagcccctggtaaacagcatcaaccatctgtagttaacttatcataacaattatctagtttggtgccaccatgttagtctttgtcatacccccaacactgtttcttttaaatggaaaatttgaataagcaagcagagtgatttctgactgggttcccctggtaagactctcctgatgccgaatgttttacagtttggcgggggctgtgagcttgccatgatgtgtgatatcatctatgccggtgagaaggcccagtttgcacagccggagatcttaataggaaccatcccaggtaaagagtgacactgtctctggcatagatgccttaggtaattactcaaaatctgcctgtgtctcagggcccacagctcatntctgaccagaggccctggatggacagccccatggctggtcagtggtccctctgtggacagccacrgaggctagagtggttgtgacagagcttggggggggccttagagtcccgggactgtgactgtgcccacatctgatggtgttgggagaggctggtcctgggtaacgctggcttctaaccatgacagttcttgcttgtgattcgtgtccatggcagagagggaacatggtgaccctgggtggcactgggagctctgcacactgccatctcactggccatggaggtcacatggcctgggttcagggtggggagtcagaccccccacccaggcccgtgagaagggcctgggctcttggcaaaaagcaacaccctctaaccccagggttctcctggtaggaagggtgggcccaggccgagcagccaggagggagctgagacctgaggggagcagctgcactcagggtgcccttcgctgccctctgagttggacgaggccgattctgaggcctggagctgtgagctcggtgcatttgtttcgggtctgatccctakaacagctgctactataagggaccagtgcctggggtcagggaggcctataagcttctaatatgttgaccacagaggctggggagggccctacagagtcatcaccttgatctaatgtcagggtgttgggggagtgtagtgtccagccctacggggcttagcaggtgttctccccatgtgcggagacgagagattgtaagaaataaagacacaagacaaagagataaagagaaaacagctgggcctgggggaccaataccatcaagaggcggagaccggtagtggccccgaatggctgggcgcactgatatttattgcatacaggacgagggggcagggtgaggacggtgaatcctctaagtgattgacaaggtgaagcaagtcacgtgatcatgggacagggggcccttccctcttaggtagccgaagcagagagggaaggcagcatatgtcagcattttcttctatgcacttacaagaaagatcaaagactttaagactttcactatttcttcttccactatctgctacgaacttcaaagaggaaccaggagtacgggaggagcatgaaagtggacaaggagtgtgatcgttgaagcaccacagggagggggttaggcctccggatgactgtgggcaggcctggagaatatccagcctctcacaagaagctggtggagcagtgttccctgactcctccaaggaaaggagactccctttcatggtctgctaagtaatggttgccttcccagacactggcgttactgcttgaccaaggagccctcaagcggcccttatgcaggtgtgacagaaggctcacctcttgccttctaggtctcttctcacaatgtgccttcagcacctgaccctatacccgccagttatttcttggttatattagtaatacaacaaagagtaatattaagagctaatgattaataatgtttatactaatgattgataatgtccatgatcatctctatatctaatttgtattataactattgttattctaactattttctttattataccgaaacagtttgtgccttcagtctcttgcctcggcacctaggtaatcctttgcccacaggggagcaccagatgtggggcctgagcttgaaaaggggctgctgcccctgatgttcccgggctcttgtgctgcctggcctctgacccctggacctagtctcagggcctatcttaagccccttggaatttgctggctgcrcagctgtgatgtcttcttgggttcactcatcacagtgccagccatgaccagcccctccctgcaggtgcgggcggcacccagagactcacccgtgctgttgggaagtcgctggcgatggagatggtcctcacyggtgaccggatctcagcccaggacgccaagcaagcaggtatgggttggggctgcccgcaagagccacctggaaacccggggygggagccccacagaaacccagggcggcatccaggtgtccccctcgggggagccccacagaaacccggggcagcatccaggtgtccccctcatgggtgccccacagaaaccctgagctgcatccagttgtctccctcgtgggagccccacagaaacccagagctgcatccaggtgtcccccatgggggagccccacagaaacccagggcrgcatccaggtgtccccctcgtgggagccccacagaaaccccgggcagcatccaagtgcccccacggtggttgcatgagcttttgggtcctgaggacctgggagaagactgactgccttttgtttctacattttgaagtactgtatgtacggaagtgaaccacacgtaagtatctggtacagaataacagcccagcaattgcgtccccaaaatgcagtgtaagcaatgggcatctccaggcctcagtggccggtcctcccactgccctgttggtgatcacagtccccgtgtctggccgcctctgccgtyggagctgtggccagcctggcccacatgtctgagagcacagtgaccgcagtgccaagatcactcagcactcaggaaggggcacgtgcggcacttcccgtgtggaagccgcccttgcttagcgtccagaggctggggtgctccagccacgctgctccccagcggccactcactcgagaagggatagacaagtgctgtttctgcacatcactcactgactttcttgtgtttcaggtcttgtcagcaagatttgtcctgttgagacactggtggaagaagccatccagtgtgcagaaaaaattgccagcaattctaaaattgtagtagcgatggccaaagaatcagtgaatgcaggtaggggatctgccaggaagasactggagaggtctccgtggctgtcaggagcattcctcagcagcaggctttctggctccaaatgaatatgccttaagccctcctgggcagaaatgsttctcagtgtctcagttctgctgtctgtagagtcgtggtttctggtcacgcactcaggaactccgctgagatgttcccagctcccctttgtaccagggcccaagaactgagccaggcctgggaggtgagggcagtacagagctggcagtggcagggaaaggctgagaagggagcagaggtcccaaatgtaaaatggtctctgccatggggaggctcggttcacctcccgagacctggggttggcggctgygtgtgcgcctggcaggtggctacgcaggcttgcagcccagcaccacgctgttcgttcttggcctggatcccttttagttctccctctgccagggaagtggatctgaacctccccctcctcagaaatgctcaagttttaatgtcacaatttattctcagcatgtggaatgagatggttattagctggttgagtccggacaggtgtgggtggccccaggcaggtcccctaacctctctgagtgcatttatctcgagggtgtggccgtcccccgggcttgccgttggcttgaggcaggatacagtgaggagagcattttgaaagaacggaggctgctgtcgcccgaggtgtttggcaaggtcgtgctcccctgggagaggatgctggcaccagccctggagccacagcgcctgcctccatctgcgcacctggatctgctctgcttggcctcgtgcaaagaacgggcctggaatgagcagagccaaaggcgttcttggtgccggccgcgcccagctctggctctcgtgctgtccttcctggttttcatccttggttatttttctctgtttgcagccccgttgccgcctcacagcctctcctcaagggcacagtttgccatctcacctttcatccagttcctctcccttcttggggccgtgggctaccggagtgtgacgtttgggggccatagcagagctgttggttctgccaggtctccgctggggcagtgcctttgagaagggcggcaccatggaagcctgtgcagggctgggccacgtcgaaagcacagttgtgcrtgggtcagtgaggagggcttcctgtcaccgtgcaggaaaagttctgcatgtaatatctccgttcataactctgggactttgtttttcagcttttgaaatgacattaacagaaggaagtaagttggagaagaaactcttttattcaacctttgccactgtgagtaaacagtgttcaacyggagaatcaagcaaattccagtcacacaagttgctgggaatttccttttaaatkttatcattaagtatcgtttctttctggtcagaactgccagcctcacctttaacgggatcagattggttccatcagtgggtcttgatgttaggaaaaaagtagagcatgtacaagttcaaaagtacagaaaccttacaggggcttttcttgtttttcctgttatgtgaggtctgtgaattgcaccctcaagcagctcctttattgaaaatgcagtttcagccgggtgggtgtcgagcatccgtagccccagcttcctgggaggctgaggcgggtcrttcgagtccaactgggcagcaaagcaagaccccgtctcaaaaaaaagacttttttaaaaaatgaggccgggcgcggtggctcaccctgtaatcccagcactttgggaggctgaggcgggtggattgcctgagctcaggagtttgaaaccagcctgggcaacatgacgaaacccgtctctactaaaaatccaaaaaattagccgggcgtggtggcaggtgcctgtaatcccagctactctggaagttgaggcaggagaatcgcttgaacccagaggcggagattacagtgagccgagatcacgccactgcactccagcctgggagacagagtgagactctgtctgaaaaaaaaaatgtaactcattttacccatgtttttttagatcattccaattatttggaataggctcaaatgtattctaataagataagctgaagctttagagcaatattttataagatttctgccagtaacttaaagtaattcctctaattaccatcataattttaattttcttccctttgaggcagagtcttgctcggtcgtccaggctggaatgcagtggtgagatctcagctcactgcaacctccacctcctgggttcaagtgattctcctgcttcagcctcccgagtagctgggattacaggtgcccaccaccacacctggctaatttttgtatttttagtagagacagagtttcaccatgttggccaggctggtcttgaactcctgacctcaagtgatctgcctgcctcggcctcccacagtgctgggattataggcgtgagccactgcacccggccagattaccattttaattcatgtctttcactgggagaaagtcatacttcggtgttttaattgttctataaaataaaaattaaaagtggtttgggcacctgaggaaggggtacagatgcgtgtacagatgcgtgtgtgtgtgtgtgtgtgtgtgtgcgcgtgcacacctggggacacacgtgcacacagtgtaagaaaagcagatgcagagttgagttctcacgtcctactccaacacagagtagcccctgatacaggccacccatcatccagttgatgacatggtgagtgaccaagatgggtgcatctgaggctctttagatgtgagcttgttggacatacacagtggctcctgaatgaccgtcacctagactggtagagagaggccgtgaaaatccccgcgcccaggcccagctctgattgggcaggtgttcctgccgctgagtcccctccccggccccctgggcccctgtgagcatgagtgaggcagagccagggagagacgggcggacattggcatcaggctctgtgaggatactgcgcgtccagctctgtttctrttccttttcctgccaggatgaccggaaagaagggatgaccgcgtttgtggaaaagagaaaggccaacttcaaagaccagtgagaaccagctgcccctgcttcacacctctgcttggagaggacaagtgcagcctgtcagttttagaagcaagtaaatcatcctcttttcaagagcagtgtccgtggtgtgyagytyctctccaattgctgcrtggtcgtggcccgacctctcacggcatgacagccttcgtcacccagcctgtgagggtcctgactggagcaccttctaaatctaagattctkctgaggagcccccgctggtccctctgggcatgctgtgctcggacggaaagcggggcctgygggtccttgtgtccctgccgctgaagaatggggctgctytgagggaaacgctgtctgctgccttcatacagatgctgattaaagtgatagcgattcagattacaccacgccttgtagtcatgtctgcaatgagcattctgtcatgttagttgtttttttaaacttttttgttttttcactgtaaggaacaacattcaaacaaaacaagtttgtatagtcagttgcctcacatcatacttccagggtggccactgtgaacagctgggcttgtgacttcctagagttctgtgcacgcacccacacacccctgcacacgggcacaggcatggtctatggttttcttccacgcccactcacgtcgagccctttcctcacgagagcccaccctattttcttcctacttctgtcataaggagctctctgttcagtttactgcattcttctctactgtgggaacacacgacgtcaacttgatcatcttaaccactgtgttttagagacgggctggagtgcgtggctcagtcacagctcactgcagcttgaatctcctgggctcaagtgatcctccccccctcccaagtagctgggaccacaggggcgcactcccacacccagctgactgtttaaatttaccttttgtagagacggggtttccccgtgttgcccaggctggtctgaaccatttcaaatgcacatttcagcggcattaagtacgttctcgttgtgcagccatgactatccaagaaagctttcattttcccaaacrgaaactgtccccgttaaacaacaaccccttttctgcttccctccagctcctggcacccacgcttctacttcctgtctctatggagggacctccatttatccctttgggtcaggctcatttcactcagccccaccccaaatccctgggttgaaatcctaacccctaccgtgactgcattaggaggggggactttgggcaatgactagtcacaagggcagagctcttcgagtgggtttagtgtcctaggagagagagggtggagctcctccagtgggattagtgccctatgagggggcggagctcctccagtgggattagtgccctatgagggcagagctcttcaagtgggattagtgccctatgagggggcagagctctttgggattagtgccctgtgagagggcggagctctttgagtgggattagtgccctatgagagggcggagctccttcagtgggattaatgccctaagagaaggcagagctcttccagtgggattagtgccctatgagaggatggagctcttccagtgagattagtgccctatgagagggcggagctcctccagtgggattactgccctatgagaagatggagctctttgagtgggattagtgccctatgagagggcggagctcctccagtgggattagtgccctatgagggggcggagctcctccagtgggattactgcccttaggagagccctgagggcactctttcacccctcccacaatgtgagtgctctgtgggaaggtgctgtctgtaaaccagggtgggcctcatcacacaccgaacctgcctggagccttggcctccagaactgtggaaagtcagtgtttatcagccacccagaccatgccactgcatcacagcagcccaagctaaggcacatactgtccagaaggtttgtgcctgttgtggcatgtttcaccatttgattttctcactaaatgacagtcctataacattctttttagtggccctgacgtttcatactatggacatgtcatcatgcccttggttctaggtatttcccccagggaagcccamctgcccccagctcagtgcagacgccagagagcgtttgccggtgtctcctccacttggccccgcagctcagtgtgcgtaggtggtctagattgtggtcatggccttgggttgggtgggcagagtgtgtgagcccccaccgctgaggacttgggctgaataccaaggacaggttcacctgcatcaagaaagaagaacagtgatctttgccgagctctggttccctgaacgctgcaggtgccacgcccgcgtgtccggttacatgtacacgcaaagggggcacacgcatgctctgcgaccgcttgcctcggaggcattggctctgcactcccacccaccccgtctgtcctcctgtgtgctgtgattggagtccactagttcagagccggcttcagggtggagcaggtttatctcgcttctgccagggcaggtgggagttctcatgcagttggccttaaaacaggcgggagatgttcttttcagataagcctcagataagccttgggatctgggactgtttgacaaatactgaaacaggtacaaagggagtttgattcaggtccaacagggcataacaggctcttcccttggggtagggaatctggaacctgctcacttactggagtggagcacgtggagtctgcgtgggtcatgaaccactggccctggagcctggagtaaatatgcagagatagataggcaccaaatgttcaagtatgcaagggaggaagcctgaacattgagaaaatccactccgtttaatttttcatgtgcactggggtcagcctccataatctgatttcaagcaatggaacctcagagatccgtagggctggctgcagcctcacgttcatacctgtgtcagccacacttggctggaagccaagaaagggcccagcatggaagccgcatctcagagggctgcgtctagttatctggttccagagcttggcagggacagacacccaacccttaggctggggaatggactttgtcttcatgctggccccagggagcctggagggaggggtgccactgtccggggcaggggaaccccagactcagagtgaggcttccactcactcctgagctagttgacctctggccccattattgtttggggtttgattaggtgttttttctttgttggttttgtttttttttttgagacggagtcactttctgtcacccaggctggagagcagtggagtgatctcggctcactgcaccctccgcttcccgggttcaagcaattctcgtgcctcagcctcccaagtagctgggattacaggcaccagtcaccatgcctggctaatttttgtatattttgaagagacggggtttcaccatgttggccaggctggtctccaacccctgacctcaagtgatccgcccgcctcggcctcccaaagtgctgggattacaggtgtgagccaccgcgcccggcctgatttggttttgaagctgaaaactttcttgcccatctctataaaatcctcttgcccttgtatatttgggtaaacggtgactctccacttacaagttggagtagaaactgcccaggtacagctctgaaacccggtggcctcggtgcaaagccacccctcattggcaggccctgggcagccccggtcttctctctgcccgagtggccggcccagggccagctgttcaggtgctgctgggtgccagcctgggtggccccaccaggcttttccgacgcagcccaggccacttcccatggggacaggctcctagggccaagcagttcaacatggagacgtctgtttcctcctggttttctgacgcggctttgtcatttttcacatacagattgattttcagaactttttaggagccgccaggcctcagagcatttgtgtcacctcagggctgagggccagggccgcagtgctagccccacagctggtgtccagctgggaatcatgtggaagaaggtggttccgcggagggagggcctggccagcctgagctcagccaaaggtcaggatgccgccatcctgggcagggggttgcaggccgctgacaccgggggatgatggaggacccttaggtgtcctggcacttcgcagctgagcctggaagctgggcctggctgccctcctggactccccccaagggggtccgaagtcctggctcccgtgtcccttgctcccggtccctcaggagcgtgggctgaaggcctgggtccagctacccaccatggtgaccccagggacccggtgcgctccgggcattctgccaggcctaagggcagcacgaagtggtcagagggcagagaccctcatgaggggaggccgcggcggttgaaccccttcggcctgagggagctcggggtgggaggctcgggtagggacactggggagcccccggccacagcgcaagggcacccgagtctcggacctggcgaggagcccgtgggctggctgggtgttgcccccacgccacgactcagcccgcacgtccccagttcctggggctccccgcccttccttgagccgcaagcggaccccagcccgccgaaccctaggcccggcccgtccccaagccccaagcccgggaccctaaagccccgccctccaataaagccccgccctccccgtaaagccccgcctctgcccctaagccccgccctccccgtaaggcccccgcctctgcccccaagccccgccctccccgtaaggccccgccccggcccccaagccccgcccctaggccccgcccgccccgtctgccgggccatggtggcgctgaagggtgtccccgcactgctgtcccccgagctgctctacgcgctggcgcggatggggcacggggacgagatcggtgagcgcagcgggccggggcctcggggagcaccccgggacaggcaggagggcgaggcttgcgcggggacccccgggccgggaagggccgcgtcctggggtgtgggcgttgctcgggcctccctggcttccgggcaggaagccccctcccccgcattctttagggaactgagacctcgtggggctctgggcggagccggcccgagcttctcccggagtccctccccagacggcccgagagccctcgcgtctgggctgcccccgagggttcggcgctttttcttctcctggggcctggggtcccggggcaggggttgggtggccgggggcctggtccgggcatcgcgggcagccgcgcgtcctctggcccctggggaggcggccgggtccgggtcggccccctggcctggtcagcacccgacagcctcgcgggcagctgttgacgcctctctgcctcccaggcagggaccttgccctccccacctccccgcgtggcttccagccctgcggatctgactgcggccggtcggcggtgggggcgyccaactggctgacctgagacctcttgtgacccacgatctgccgccatgactgggtgggaggacgggcggcgccgaccccgagggcagggataggtgcygacacgggctgtcctcccggctgtttagttcttgcggacttgaacttcccggcctcctccatctgccagtgtgggcccatggagatccgtgcagacggtgagcgagccccaggtcccccagggcagggcgggcgggtgagcggtgctcctggctctgaggctcctctgtggcctgccgtggccccaagtccatgcttgcagtgtgaagggtgcagacaggcaggcgggcgggcgggctggagactgagtgctgcctcctctgccctccaggcctgggcatcccgcagctcctggaggccgtgctgaagctgctgcccctggacacctatgtggagagtccggtgagggctgagtcgcccctgcaccctgctgctccgtgcctcagtttccccttttgcgggcttcatagggcccacctgccttggagtggggggaagccatgtgtccccaaaggggccctgaccctcaccaggggagtcccgaatggtcacctgaccaggaaggctggcagtgcccagggccccagagctgacccctccctctaggctgcagtcatggagctggtgcccagcgacaaggagaggggcctgcagaccccagtgtggacggagtacgagtccatcctacgcagggccggctgtgtggtaagcctgcagccccagttgtggggaaaaggccagggaccctctgtctcctggaggctcaggaggagccaaagacagagggtcccaagctctgtcctcaagtggtctcccacccatcaccctgagaaccccggaccactggcactccttcaccagcc
